United States Patent Application Publication US 2026/0256907 A1, published September 3, 2026 (application 19/366,428).

The application's sequence listing, which the Patent Office published only in electronic form, follows.

SEQUENCE LISTING (839 sequences)

SEQ ID NO: 1 - DNA, 19 bp, Hepatitis B virus
  source 1..19: mol_type = genomic DNA
cttggtcatgggccatcag

SEQ ID NO: 2 - DNA, 20 bp, synthetic construct
  source 1..20: mol_type = other DNA
gcagaggtgaagcgaagtgc

SEQ ID NO: 3 - DNA, 3182 bp, Hepatitis B virus
  source 1..3182: mol_type = genomic DNA
aattccacaacctttcaccaaactctgcaagatcccagagtgagaggcctgtatttccctgctggtggctccagttcaggagcagtaaaccctgttccgactactgcctctcccttatcgtcaatcttctcgaggattggggaccctgcgctgaacatggagaacatcacatcaggattcctaggaccccttctcgtgttacaggcggggtttttcttgttgacaagaatcctcacaataccgcagagtctagactcgtggtggacttctctcaattttctagggggaactaccgtgtgtcttggccaaaattcgcagtccccaacctccaatcactcaccaacctcctgtcctccaacttgtcctggttatcgctggatgtgtctgcggcgttttatcatcttcctcttcatcctgctgctatgcctcatcttcttgttggttcttctggactatcaaggtatgttgcccgtttgtcctctaattccaggatcctcaaccaccagcacgggaccatgccgaacctgcatgactactgctcaaggaacctctatgtatccctcctgttgctgtaccaaaccttcggacggaaattgcacctgtattcccatcccatcatcctgggctttcggaaaattcctatgggagtgggcctcagcccgtttctcctggctcagtttactagtgccatttgttcagtggttcgtagggctttcccccactgtttggctttcagttatatggatgatgtggtattgggggccaagtctgtacagcatcttgagtccctttttaccgctgttaccaattttcttttgtctttgggtatacatttaaaccctaacaaaacaaagagatggggttactctctgaattttatgggttatgtcattggaagttatgggtccttgccacaagaacacatcatacaaaaaatcaaagaatgttttagaaaacttcctattaacaggcctattgattggaaagtatgtcaacgaattgtgggtcttttgggttttgctgccccatttacacaatgtggttatcctgcgttaatgcccttgtatgcatgtattcaatctaagcaggctttcactttctcgccaacttacaaggcctttctgtgtaaacaatacctgaacctttaccccgttgcccggcaacggccaggtctgtgccaagtgtttgctgacgcaacccccactggctggggcttggtcatgggccatcagcgcgtgcgtggaaccttttcggctcctctgccgatccatactgcggaactcctagccgcttgttttgctcgcagcaggtctggagcaaacattatcgggactgataactctgttgtcctctcccgcaaatatacatcgtatccatggctgctaggctgtgctgccaactggatcctgcgcgggacgtcctttgtttacgtcccgtcggcgctgaatcctgcggacgacccttctcggggtcgcttgggactctctcgtccccttctccgtctgccgttccgaccgaccacggggcgcacctctctttacgcggactccccgtctgtgccttctcatctgccggaccgtgtgcacttcgcttcacctctgcacgtcgcatggagaccaccgtgaacgcccaccgaatgttgcccaaggtcttacataagaggactcttggactctctgcaatgtcaacgaccgaccttgaggcatacttcaaagactgtttgtttaaagactgggaggagttgggggaggagattagattaaaggtctttgtactaggaggctgtaggcataaattggtctgcgcaccagcaccatgcaactttttcacctctgcctaatcatctcttgttcatgtcctactgttcaagcctccaagctgtgccttgggtggctttggggcatggacatcgacccttataaagaatttggagctactgtggagttactctcgtttttgccttctgacttctttccttcagtacgagatcttctagataccgcctcagctctgtatcgggaagccttagagtctcctgagcattgttcacctcaccatactgcactcaggcaagcaattctttgctggggggaactaatgactctagctacctgggtgggtgttaatttggaagatccagcatctagagacctagtagtcagttatgtcaacactaatatgggcctaaagttcaggcaactcttgtggtttcacatttcttgtctcacttttggaagagaaaccgttatagagtatttggtgtctttcggagtgtggattcgcactcctccagcttatagaccaccaaatgcccctatcctatcaacacttccggaaactactgttgttagacgacgaggcaggtcccctagaagaagaactccctcgcctcgcagacgaaggtctcaatcgccgcgtcgcagaagatctcaatctcgggaacctcaatgttagtattccttggactcataaggtggggaactttactggtctttattcttctactgtacctgtctttaatcctcattggaaaacaccatcttttcctaatatacatttacaccaagacattatcaaaaaatgtgaacagtttgtaggcccacttacagttaatgagaaaagaagattgcaattgattatgcctgctaggttttatccaaaggttaccaaatatttaccattggataagggtattaaaccttattatccagaacatctagttaatcattacttccaaactagacactatttacacactctatggaaggcgggtatattatataagagagaaacaacacatagcgcctcattttgtgggtcaccatattcttgggaacaagatctacagcatggggcagaatctttccaccagcaatcctctgggattctttcccgaccaccagttggatccagccttcagagcaaacacagcaaatccagattgggacttcaatcccaacaaggacacctggccagacgccaacaaggtaggagctggagcattcgggctgggtttcaccccaccgcacggaggccttttggggtggagccctcaggctcagggcatactacaaactttgccagcaaatccgcctcctgcctccaccaatcgccagacaggaaggcagcctaccccgctgtctccacctttgagaaacactcatcctcaggccatgcagtgg

SEQ ID NO: 4 - DNA, 20 bp, Hepatitis B virus
  source 1..20: mol_type = genomic DNA
gcacttcgcttcacctctgc

SEQ ID NO: 5 - DNA, 20 bp, synthetic construct
  source 1..20: mol_type = other DNA
gtgaagcgaagtgcacacgg

SEQ ID NO: 6-9 - skipped (4 entries)

SEQ ID NO: 10 - DNA, 20 bp, synthetic construct
  source 1..20: mol_type = other DNA
  modified_base 1: mod_base = OTHER; note = 2'-O-methoxyethyl guanosine
  modified_base 2: mod_base = OTHER; note = 2'-O-methoxyethyl 5-methylcytidine
  modified_base 3: mod_base = OTHER; note = 2'-O-methoxyethyl adenosine
  modified_base 4: mod_base = OTHER; note = 2'-O-methoxyethyl guanosine
  modified_base 5: mod_base = OTHER; note = 2'-O-methoxyethyl adenosine
  modified_base 13: mod_base = OTHER; note = 2'-deoxy 5-methylcytidine
  modified_base 16: mod_base = OTHER; note = 2'-O-methoxyethyl adenosine
  modified_base 17: mod_base = OTHER; note = 2'-O-methoxyethyl guanosine
  modified_base 18: mod_base = OTHER; note = 2'-O-methoxyethyl thymidine
  modified_base 19: mod_base = OTHER; note = 2'-O-methoxyethyl guanosine
  modified_base 20: mod_base = OTHER; note = 2'-O-methoxyethyl 5-methylcytidine
  misc_feature 1..5: note = RNA
  misc_feature 6..15: note = DNA
  misc_feature 16..20: note = RNA
gcagaggtgaagcgaagtgc

SEQ ID NO: 11 - DNA, 40 bp, synthetic construct
  source 1..40: mol_type = other DNA
  modified_base 1: mod_base = OTHER; note = 2'-deoxy cytidine
  modified_base 5: mod_base = OTHER; note = 2'-deoxy cytidine
  modified_base 8: mod_base = OTHER; note = 2'-deoxy cytidine
  modified_base 12: mod_base = OTHER; note = 2'-deoxy cytidine
  modified_base 23: mod_base = OTHER; note = 2'-deoxy cytidine
  modified_base 30: mod_base = OTHER; note = 2'-deoxy cytidine
  modified_base 31: mod_base = OTHER; note = 2'-deoxy cytidine
  modified_base 34: mod_base = OTHER; note = 2'-deoxy cytidine
  modified_base 37: mod_base = OTHER; note = 2'-deoxy cytidine
caaacaacaagcagaggtgaagcgaagtgccaacaacaaa

SEQ ID NO: 12 - DNA, 40 bp, synthetic construct
  source 1..40: mol_type = other DNA
  modified_base 2: mod_base = OTHER; note = 2'-deoxy 5-methylcytidine
  modified_base 13: mod_base = OTHER; note = 2'-deoxy 5-methylcytidine
  modified_base 20: mod_base = OTHER; note = 2'-deoxy 5-methylcytidine
  modified_base 24: mod_base = OTHER; note = 2'-deoxy 5-methylcytidine
  modified_base 27: mod_base = OTHER; note = 2'-deoxy 5-methylcytidine
  modified_base 31: mod_base = OTHER; note = 2'-deoxy 5-methylcytidine
  modified_base 34: mod_base = OTHER; note = 2'-deoxy 5-methylcytidine
  modified_base 38: mod_base = OTHER; note = 2'-deoxy 5-methylcytidine
gcagaggtgaagcgaagtgcaaacaacaaacaacaaacaa

SEQ ID NO: 13 - RNA, 20 nt, synthetic construct
  source 1..20: mol_type = other RNA
  modified_base 1: mod_base = OTHER; note = 2'-O-methoxyethyl guanosine
  modified_base 2: mod_base = OTHER; note = 2'-O-methoxyethyl 5-methylcytidine
  modified_base 3: mod_base = OTHER; note = 2'-O-methoxyethyl adenosine
  modified_base 4: mod_base = OTHER; note = 2'-O-methoxyethyl guanosine
  modified_base 5: mod_base = OTHER; note = 2'-O-methoxyethyl adenosine
  modified_base 6: mod_base = OTHER; note = 2'-O-methoxyethyl guanosine
  modified_base 7: mod_base = OTHER; note = 2'-O-methoxyethyl guanosine
  modified_base 8: mod_base = OTHER; note = 2'-O-methoxyethyl thymidine
  modified_base 9: mod_base = OTHER; note = 2'-O-methoxyethyl guanosine
  modified_base 10: mod_base = OTHER; note = 2'-O-methoxyethyl adenosine
  modified_base 11: mod_base = OTHER; note = 2'-O-methoxyethyl adenosine
  modified_base 12: mod_base = OTHER; note = 2'-O-methoxyethyl guanosine
  modified_base 13: mod_base = OTHER; note = 2'-O-methoxyethyl 5-methylcytidine
  modified_base 14: mod_base = OTHER; note = 2'-O-methoxyethyl guanosine
  modified_base 15: mod_base = OTHER; note = 2'-O-methoxyethyl adenosine
  modified_base 16: mod_base = OTHER; note = 2'-O-methoxyethyl adenosine
  modified_base 17: mod_base = OTHER; note = 2'-O-methoxyethyl guanosine
  modified_base 18: mod_base = OTHER; note = 2'-O-methoxyethyl thymidine
  modified_base 19: mod_base = OTHER; note = 2'-O-methoxyethyl guanosine
  modified_base 20: mod_base = OTHER; note = 2'-O-methoxyethyl 5-methylcytidine
gcagaggtgaagcgaagtgc

SEQ ID NO: 14 - DNA, 20 bp, synthetic construct
  source 1..20: mol_type = other DNA
  modified_base 1: mod_base = OTHER; note = 2'-O-methoxyethyl guanosine
  modified_base 2: mod_base = OTHER; note = 2'-O-methoxyethyl 5-methylcytidine
  modified_base 3: mod_base = OTHER; note = 2'-O-methoxyethyl adenosine
  modified_base 4: mod_base = OTHER; note = 2'-O-methoxyethyl guanosine
  modified_base 5: mod_base = OTHER; note = 2'-O-methoxyethyl adenosine
  modified_base 6: mod_base = OTHER; note = 2'-O-methoxyethyl guanosine
  modified_base 7: mod_base = OTHER; note = 2'-O-methoxyethyl guanosine
  modified_base 8: mod_base = OTHER; note = 2'-O-methoxyethyl thymidine
  modified_base 9: mod_base = OTHER; note = 2'-O-methoxyethyl guanosine
  modified_base 12: mod_base = OTHER; note = 2'-O-methoxyethyl guanosine
  modified_base 13: mod_base = OTHER; note = 2'-O-methoxyethyl 5-methylcytidine
  modified_base 14: mod_base = OTHER; note = 2'-O-methoxyethyl guanosine
  modified_base 15: mod_base = OTHER; note = 2'-O-methoxyethyl adenosine
  modified_base 16: mod_base = OTHER; note = 2'-O-methoxyethyl adenosine
  modified_base 17: mod_base = OTHER; note = 2'-O-methoxyethyl guanosine
  modified_base 18: mod_base = OTHER; note = 2'-O-methoxyethyl thymidine
  modified_base 19: mod_base = OTHER; note = 2'-O-methoxyethyl guanosine
  modified_base 20: mod_base = OTHER; note = 2'-O-methoxyethyl 5-methylcytidine
  misc_feature 1..9: note = RNA
  misc_feature 10..11: note = DNA
  misc_feature 12..20: note = RNA
gcagaggtgaagcgaagtgc

SEQ ID NO: 15 - DNA, 20 bp, synthetic construct
  source 1..20: mol_type = other DNA
  modified_base 1: mod_base = OTHER; note = 2'-O-methoxyethyl guanosine
  modified_base 2: mod_base = OTHER; note = 2'-O-methoxyethyl 5-methylcytidine
  modified_base 3: mod_base = OTHER; note = 2'-O-methoxyethyl adenosine
  modified_base 4: mod_base = OTHER; note = 2'-O-methoxyethyl guanosine
  modified_base 5: mod_base = OTHER; note = 2'-O-methoxyethyl adenosine
  modified_base 6: mod_base = OTHER; note = 2'-O-methoxyethyl guanosine
  modified_base 7: mod_base = OTHER; note = 2'-O-methoxyethyl guanosine
  modified_base 8: mod_base = OTHER; note = 2'-O-methoxyethyl thymidine
  modified_base 13: mod_base = OTHER; note = 2'-O-methoxyethyl 5-methylcytidine
  modified_base 14: mod_base = OTHER; note = 2'-O-methoxyethyl guanosine
  modified_base 15: mod_base = OTHER; note = 2'-O-methoxyethyl adenosine
  modified_base 16: mod_base = OTHER; note = 2'-O-methoxyethyl adenosine
  modified_base 17: mod_base = OTHER; note = 2'-O-methoxyethyl guanosine
  modified_base 18: mod_base = OTHER; note = 2'-O-methoxyethyl thymidine
  modified_base 19: mod_base = OTHER; note = 2'-O-methoxyethyl guanosine
  modified_base 20: mod_base = OTHER; note = 2'-O-methoxyethyl 5-methylcytidine
  misc_feature 1..8: note = RNA
  misc_feature 9..12: note = DNA
  misc_feature 13..20: note = RNA
gcagaggtgaagcgaagtgc

SEQ ID NO: 16 - DNA, 20 bp, synthetic construct
  source 1..20: mol_type = other DNA
  modified_base 1: mod_base = OTHER; note = 2'-O-methoxyethyl guanosine
  modified_base 2: mod_base = OTHER; note = 2'-O-methoxyethyl 5-methylcytidine
  modified_base 3: mod_base = OTHER; note = 2'-O-methoxyethyl adenosine
  modified_base 4: mod_base = OTHER; note = 2'-O-methoxyethyl guanosine
  modified_base 5: mod_base = OTHER; note = 2'-O-methoxyethyl adenosine
  modified_base 6: mod_base = OTHER; note = 2'-O-methoxyethyl guanosine
  modified_base 13: mod_base = OTHER; note = 2'-deoxy 5-methylcytidine
  modified_base 15: mod_base = OTHER; note = 2'-O-methoxyethyl adenosine
  modified_base 16: mod_base = OTHER; note = 2'-O-methoxyethyl adenosine
  modified_base 17: mod_base = OTHER; note = 2'-O-methoxyethyl guanosine
  modified_base 18: mod_base = OTHER; note = 2'-O-methoxyethyl thymidine
  modified_base 19: mod_base = OTHER; note = 2'-O-methoxyethyl guanosine
  modified_base 20: mod_base = OTHER; note = 2'-O-methoxyethyl 5-methylcytidine
  misc_feature 1..6: note = RNA
  misc_feature 7..14: note = DNA
  misc_feature 15..20: note = RNA
gcagaggtgaagcgaagtgc

SEQ ID NO: 17 - DNA, 40 bp, synthetic construct; identical to SEQ ID NO: 11
  source 1..40: mol_type = other DNA
  modified_base 1: mod_base = OTHER; note = 2'-O-methyl 5-methylcytidine
  modified_base 2: mod_base = OTHER; note = 2'-O-methyl adenosine
  modified_base 3: mod_base = OTHER; note = 2'-O-methyl adenosine
  modified_base 4: mod_base = OTHER; note = 2'-O-methyl adenosine
  modified_base 5: mod_base = OTHER; note = 2'-O-methyl 5-methylcytidine
  modified_base 6: mod_base = OTHER; note = 2'-O-methyl adenosine
  modified_base 7: mod_base = OTHER; note = 2'-O-methyl adenosine
  modified_base 8: mod_base = OTHER; note = 2'-O-methyl 5-methylcytidine
  modified_base 9: mod_base = OTHER; note = 2'-O-methyl adenosine
  modified_base 10: mod_base = OTHER; note = 2'-O-methyl adenosine
  modified_base 11: mod_base = OTHER; note = 2'-O-methyl guanosine
  modified_base 12: mod_base = OTHER; note = 2'-O-methyl 5-methylcytidine
  modified_base 13: mod_base = OTHER; note = 2'-O-methyl adenosine
  modified_base 14: mod_base = OTHER; note = 2'-O-methyl guanosine
  modified_base 15: mod_base = OTHER; note = 2'-O-methyl adenosine
  modified_base 23: mod_base = OTHER; note = 2'-deoxy cytidine
  modified_base 26: mod_base = OTHER; note = 2'-O-methyl adenosine
  modified_base 27: mod_base = OTHER; note = 2'-O-methyl guanosine
  modified_base 28: mod_base = OTHER; note = 2'-O-methyl thymidine
  modified_base 29: mod_base = OTHER; note = 2'-O-methyl guanosine
  modified_base 30: mod_base = OTHER; note = 2'-O-methyl 5-methylcytidine
  modified_base 31: mod_base = OTHER; note = 2'-O-methyl 5-methylcytidine
  modified_base 32: mod_base = OTHER; note = 2'-O-methyl adenosine
  modified_base 33: mod_base = OTHER; note = 2'-O-methyl adenosine
  modified_base 34: mod_base = OTHER; note = 2'-O-methyl 5-methylcytidine
  modified_base 35: mod_base = OTHER; note = 2'-O-methyl adenosine
  modified_base 36: mod_base = OTHER; note = 2'-O-methyl adenosine
  modified_base 37: mod_base = OTHER; note = 2'-O-methyl 5-methylcytidine
  modified_base 38: mod_base = OTHER; note = 2'-O-methyl adenosine
  modified_base 39: mod_base = OTHER; note = 2'-O-methyl adenosine
  modified_base 40: mod_base = OTHER; note = 2'-O-methyl adenosine
  misc_feature 1..15: note = RNA
  misc_feature 16..25: note = DNA
  misc_feature 26..40: note = RNA

SEQ ID NO: 18 - RNA, 20 nt, synthetic construct
  source 1..20: mol_type = other RNA
  modified_base 1: mod_base = OTHER; note = 2'-O-methyl guanosine
  modified_base 2: mod_base = OTHER; note = 2'-O-methyl 5-methylcytidine
  modified_base 3: mod_base = OTHER; note = 2'-O-methyl adenosine
  modified_base 4: mod_base = OTHER; note = 2'-O-methyl guanosine
  modified_base 5: mod_base = OTHER; note = 2'-O-methyl adenosine
  modified_base 6: mod_base = OTHER; note = 2'-O-methyl guanosine
  modified_base 7: mod_base = OTHER; note = 2'-O-methyl guanosine
  modified_base 8: mod_base = OTHER; note = 2'-O-methyl thymidine
  modified_base 9: mod_base = OTHER; note = 2'-O-methyl guanosine
  modified_base 10: mod_base = OTHER; note = 2'-O-methyl adenosine
  modified_base 11: mod_base = OTHER; note = 2'-O-methyl adenosine
  modified_base 12: mod_base = OTHER; note = 2'-O-methyl guanosine
  modified_base 13: mod_base = OTHER; note = 2'-O-methyl 5-methylcytidine
  modified_base 14: mod_base = OTHER; note = 2'-O-methyl guanosine
  modified_base 15: mod_base = OTHER; note = 2'-O-methyl adenosine
  modified_base 16: mod_base = OTHER; note = 2'-O-methyl adenosine
  modified_base 17: mod_base = OTHER; note = 2'-O-methyl guanosine
  modified_base 18: mod_base = OTHER; note = 2'-O-methyl thymidine
  modified_base 19: mod_base = OTHER; note = 2'-O-methyl guanosine
  modified_base 20: mod_base = OTHER; note = 2'-O-methyl 5-methylcytidine
gcagaggtgaagcgaagtgc

SEQ ID NO: 19 - RNA, 20 nt, synthetic construct
  source 1..20: mol_type = other RNA
  modified_base 1: mod_base = OTHER; note = 2'-O-methoxyethyl guanosine
  modified_base 2: mod_base = OTHER; note = 2'-O-methoxyethyl 5-methylcytidine
  modified_base 3: mod_base = OTHER; note = 2'-O-methoxyethyl adenosine
  modified_base 4: mod_base = OTHER; note = 2'-O-methoxyethyl guanosine
  modified_base 5: mod_base = OTHER; note = 2'-O-methoxyethyl adenosine
  modified_base 6: mod_base = OTHER; note = 2'-O-methoxyethyl guanosine
  modified_base 7: mod_base = OTHER; note = 2'-O-methoxyethyl guanosine
  modified_base 8: mod_base = OTHER; note = 2'-O-methoxyethyl thymidine
  modified_base 9: mod_base = OTHER; note = 2'-O-methoxyethyl guanosine
  modified_base 10: mod_base = OTHER; note = 2'-O-methoxyethyl adenosine
  modified_base 11: mod_base = OTHER; note = 2'-O-methoxyethyl adenosine
  modified_base 12: mod_base = OTHER; note = 2'-O-methoxyethyl guanosine
  modified_base 13: mod_base = OTHER; note = 2'-O-methoxyethyl 5-methylcytidine
  modified_base 14: mod_base = OTHER; note = 2'-O-methoxyethyl guanosine
  modified_base 15: mod_base = OTHER; note = 2'-O-methoxyethyl adenosine
  modified_base 16: mod_base = OTHER; note = 2'-O-methoxyethyl adenosine
  modified_base 17: mod_base = OTHER; note = 2'-O-methoxyethyl guanosine
  modified_base 18: mod_base = OTHER; note = 2'-O-methoxyethyl thymidine
  modified_base 19: mod_base = OTHER; note = 2'-O-methoxyethyl guanosine
  modified_base 20: mod_base = OTHER; note = 2'-O-methoxyethyl 5-methylcytidine
gcagaggtgaagcgaagtgc

SEQ ID NO: 20 - DNA, 20 bp, synthetic construct
  source 1..20: mol_type = other DNA
  modified_base 1: mod_base = OTHER; note = Locked nucleic acid with guanine base
  modified_base 2: mod_base = OTHER; note = 2'-O-methoxyethyl 5-methylcytidine
  modified_base 3: mod_base = OTHER; note = Locked nucleic acid with adenine base
  modified_base 4: mod_base = OTHER; note = 2'-O-methoxyethyl guanosine
  modified_base 5: mod_base = OTHER; note = 2'-O-methoxyethyl adenosine
  modified_base 6: mod_base = OTHER; note = 2'-O-methoxyethyl guanosine
  modified_base 7: mod_base = OTHER; note = 2'-O-methoxyethyl guanosine
  modified_base 8: mod_base = OTHER; note = 2'-O-methoxyethyl thymidine
  modified_base 9: mod_base = OTHER; note = 2'-O-methoxyethyl guanosine
  modified_base 10: mod_base = OTHER; note = 2'-O-methoxyethyl adenosine
  modified_base 13: mod_base = OTHER; note = 2'-deoxy 5-methylcytidine
  modified_base 15: mod_base = OTHER; note = 2'-O-methoxyethyl adenosine
  modified_base 16: mod_base = OTHER; note = 2'-O-methoxyethyl adenosine
  modified_base 17: mod_base = OTHER; note = 2'-O-methoxyethyl guanosine
  modified_base 18: mod_base = OTHER; note = 2'-O-methoxyethyl thymidine
  modified_base 19: mod_base = OTHER; note = 2'-O-methoxyethyl guanosine
  modified_base 20: mod_base = OTHER; note = 2'-O-methoxyethyl 5-methylcytidine
  misc_feature 1..10: note = RNA
  misc_feature 11..14: note = DNA
  misc_feature 15..20: note = RNA
gcagaggtgaagcgaagtgc

SEQ ID NO: 21 - DNA, 20 bp, synthetic construct
  source 1..20: mol_type = other DNA
  modified_base 1: mod_base = OTHER; note = Locked nucleic acid with guanine base
  modified_base 2: mod_base = OTHER; note = 2'-O-methoxyethyl 5-methylcytidine
  modified_base 3: mod_base = OTHER; note = Locked nucleic acid with adenine base
  modified_base 4: mod_base = OTHER; note = 2'-O-methoxyethyl guanosine
  modified_base 5: mod_base = OTHER; note = 2'-O-methoxyethyl adenosine
  modified_base 6: mod_base = OTHER; note = 2'-O-methoxyethyl guanosine
  modified_base 7: mod_base = OTHER; note = 2'-O-methoxyethyl guanosine
  modified_base 8: mod_base = OTHER; note = 2'-O-methoxyethyl thymidine
  modified_base 9: mod_base = OTHER; note = 2'-O-methoxyethyl guanosine
  modified_base 13: mod_base = OTHER; note = 2'-deoxy 5-methylcytidine
  modified_base 15: mod_base = OTHER; note = 2'-O-methoxyethyl adenosine
  modified_base 16: mod_base = OTHER; note = 2'-O-methoxyethyl adenosine
  modified_base 17: mod_base = OTHER; note = 2'-O-methoxyethyl guanosine
  modified_base 18: mod_base = OTHER; note = 2'-O-methoxyethyl thymidine
  modified_base 19: mod_base = OTHER; note = 2'-O-methoxyethyl guanosine
  modified_base 20: mod_base = OTHER; note = 2'-O-methoxyethyl 5-methylcytidine
  misc_feature 1..9: note = RNA
  misc_feature 10..14: note = DNA
  misc_feature 15..20: note = RNA
gcagaggtgaagcgaagtgc

SEQ ID NO: 22 - DNA, 20 bp, synthetic construct
  source 1..20: mol_type = other DNA
  modified_base 1: mod_base = OTHER; note = Locked nucleic acid with guanine base
  modified_base 2: mod_base = OTHER; note = 2'-O-methoxyethyl 5-methylcytidine
  modified_base 3: mod_base = OTHER; note = Locked nucleic acid with adenine base
  modified_base 4: mod_base = OTHER; note = 2'-O-methoxyethyl guanosine
  modified_base 5: mod_base = OTHER; note = 2'-O-methoxyethyl adenosine
  modified_base 6: mod_base = OTHER; note = 2'-O-methoxyethyl guanosine
  modified_base 7: mod_base = OTHER; note = 2'-O-methoxyethyl guanosine
  modified_base 8: mod_base = OTHER; note = 2'-O-methoxyethyl thymidine
  modified_base 13: mod_base = OTHER; note = 2'-deoxy 5-methylcytidine
  modified_base 15: mod_base = OTHER; note = 2'-O-methoxyethyl adenosine
  modified_base 16: mod_base = OTHER; note = 2'-O-methoxyethyl adenosine
  modified_base 17: mod_base = OTHER; note = 2'-O-methoxyethyl guanosine
  modified_base 18: mod_base = OTHER; note = 2'-O-methoxyethyl thymidine
  modified_base 19: mod_base = OTHER; note = 2'-O-methoxyethyl guanosine
  modified_base 20: mod_base = OTHER; note = 2'-O-methoxyethyl 5-methylcytidine
  misc_feature 1..8: note = RNA
  misc_feature 9..14: note = DNA
  misc_feature 15..20: note = RNA
gcagaggtgaagcgaagtgc

SEQ ID NO: 23 - DNA, 20 bp, synthetic construct
  source 1..20: mol_type = other DNA
  modified_base 1: mod_base = OTHER; note = Locked nucleic acid with guanine base
  modified_base 2: mod_base = OTHER; note = 2'-O-methoxyethyl 5-methylcytidine
  modified_base 3: mod_base = OTHER; note = Locked nucleic acid with adenine base
  modified_base 4: mod_base = OTHER; note = 2'-O-methoxyethyl guanosine
  modified_base 5: mod_base = OTHER; note = 2'-O-methoxyethyl adenosine
  modified_base 6: mod_base = OTHER; note = 2'-O-methoxyethyl guanosine
  modified_base 7: mod_base = OTHER; note = 2'-O-methoxyethyl guanosine
  modified_base 13: mod_base = OTHER; note = 2'-deoxy 5-methylcytidine
  modified_base 14: mod_base = OTHER; note = 2'-O-methoxyethyl guanosine
  modified_base 15: mod_base = OTHER; note = 2'-O-methoxyethyl adenosine
  modified_base 16: mod_base = OTHER; note = 2'-O-methoxyethyl adenosine
  modified_base 17: mod_base = OTHER; note = 2'-O-methoxyethyl guanosine
  modified_base 18: mod_base = OTHER; note = 2'-O-methoxyethyl thymidine
  modified_base 19: mod_base = OTHER; note = 2'-O-methoxyethyl guanosine
  modified_base 20: mod_base = OTHER; note = 2'-O-methoxyethyl 5-methylcytidine
  misc_feature 1..7: note = RNA
  misc_feature 8..13: note = DNA
  misc_feature 14..20: note = RNA
gcagaggtgaagcgaagtgc

SEQ ID NO: 24 - DNA, 20 bp, synthetic construct
  source 1..20: mol_type = other DNA
  modified_base 1: mod_base = OTHER; note = Locked nucleic acid with guanine base
  modified_base 2: mod_base = OTHER; note = 2'-O-methoxyethyl 5-methylcytidine
  modified_base 3: mod_base = OTHER; note = Locked nucleic acid with adenine base
  modified_base 4: mod_base = OTHER; note = 2'-O-methoxyethyl guanosine
  modified_base 5: mod_base = OTHER; note = 2'-O-methoxyethyl adenosine
  modified_base 6: mod_base = OTHER; note = 2'-O-methoxyethyl guanosine
  modified_base 7: mod_base = OTHER; note = 2'-O-methoxyethyl guanosine
  modified_base 13: mod_base = OTHER; note = 2'-deoxy 5-methylcytidine
  modified_base 15: mod_base = OTHER; note = 2'-O-methoxyethyl adenosine
  modified_base 16: mod_base = OTHER; note = 2'-O-methoxyethyl adenosine
  modified_base 17: mod_base = OTHER; note = 2'-O-methoxyethyl guanosine
  modified_base 18: mod_base = OTHER; note = 2'-O-methoxyethyl thymidine
  modified_base 19: mod_base = OTHER; note = 2'-O-methoxyethyl guanosine
  modified_base 20: mod_base = OTHER; note = 2'-O-methoxyethyl 5-methylcytidine
  misc_feature 1..7: note = RNA
  misc_feature 8..14: note = DNA
  misc_feature 15..20: note = RNA
gcagaggtgaagcgaagtgc

SEQ ID NO: 25 - DNA, 20 bp, synthetic construct
  source 1..20: mol_type = other DNA
  modified_base 1: mod_base = OTHER; note = Locked nucleic acid with guanine base
  modified_base 2: mod_base = OTHER; note = 2'-O-methoxyethyl 5-methylcytidine
  modified_base 3: mod_base = OTHER; note = Locked nucleic acid with adenine base
  modified_base 4: mod_base = OTHER; note = 2'-O-methoxyethyl guanosine
  modified_base 5: mod_base = OTHER; note = 2'-O-methoxyethyl adenosine
  modified_base 6: mod_base = OTHER; note = 2'-O-methoxyethyl guanosine
  modified_base 13: mod_base = OTHER; note = 2'-deoxy 5-methylcytidine
  modified_base 15: mod_base = OTHER; note = 2'-O-methoxyethyl adenosine
  modified_base 16: mod_base = OTHER; note = 2'-O-methoxyethyl adenosine
  modified_base 17: mod_base = OTHER; note = 2'-O-methoxyethyl guanosine
  modified_base 18: mod_base = OTHER; note = 2'-O-methoxyethyl thymidine
  modified_base 19: mod_base = OTHER; note = 2'-O-methoxyethyl guanosine
  modified_base 20: mod_base = OTHER; note = 2'-O-methoxyethyl 5-methylcytidine
  misc_feature 1..6: note = RNA
  misc_feature 7..14: note = DNA
  misc_feature 15..20: note = RNA
gcagaggtgaagcgaagtgc

SEQ ID NO: 26 - DNA, 20 bp, synthetic construct
  source 1..20: mol_type = other DNA
  modified_base 1: mod_base = OTHER; note = Locked nucleic acid with guanine base
  modified_base 2: mod_base = OTHER; note = 2'-O-methoxyethyl 5-methylcytidine
  modified_base 3: mod_base = OTHER; note = Locked nucleic acid with adenine base
  modified_base 4: mod_base = OTHER; note = 2'-O-methoxyethyl guanosine
  modified_base 5: mod_base = OTHER; note = 2'-O-methoxyethyl adenosine
  modified_base 6: mod_base = OTHER; note = 2'-O-methoxyethyl guanosine
  modified_base 10: mod_base = OTHER; note = 2'-O-methoxyethyl adenosine
  modified_base 13: mod_base = OTHER; note = 2'-deoxy 5-methylcytidine
  modified_base 15: mod_base = OTHER; note = 2'-O-methoxyethyl adenosine
  modified_base 16: mod_base = OTHER; note = 2'-O-methoxyethyl adenosine
  modified_base 17: mod_base = OTHER; note = 2'-O-methoxyethyl guanosine
  modified_base 18: mod_base = OTHER; note = 2'-O-methoxyethyl thymidine
  modified_base 19: mod_base = OTHER; note = 2'-O-methoxyethyl guanosine
  modified_base 20: mod_base = OTHER; note = 2'-O-methoxyethyl 5-methylcytidine
  misc_feature 1..6: note = RNA
  misc_feature 7..9: note = DNA
  misc_feature 10: note = RNA
  misc_feature 11..14: note = DNA
  misc_feature 15..20: note = RNA
gcagaggtgaagcgaagtgc

SEQ ID NO: 27 - DNA, 20 bp, synthetic construct
  source 1..20: mol_type = other DNA
  modified_base 1: mod_base = OTHER; note = 2'-O-methoxyethyl guanosine
  modified_base 2: mod_base = OTHER; note = 2'-deoxy 5-methylcytidine
  modified_base 3: mod_base = OTHER; note = Locked nucleic acid with adenine base
  modified_base 4: mod_base = OTHER; note = 2'-O-methoxyethyl guanosine
  modified_base 5: mod_base = OTHER; note = 2'-O-methoxyethyl adenosine
  modified_base 6: mod_base = OTHER; note = 2'-O-methoxyethyl guanosine
  modified_base 7: mod_base = OTHER; note = 2'-O-methoxyethyl guanosine
  modified_base 8: mod_base = OTHER; note = 2'-O-methoxyethyl thymidine
  modified_base 13: mod_base = OTHER; note = 2'-deoxy 5-methylcytidine
  modified_base 15: mod_base = OTHER; note = 2'-O-methoxyethyl adenosine
  modified_base 16: mod_base = OTHER; note = Locked nucleic acid with adenine base
  modified_base 17: mod_base = OTHER; note = Locked nucleic acid with guanine base
  modified_base 18: mod_base = OTHER; note = 2'-O-methoxyethyl thymidine
  modified_base 19: mod_base = OTHER; note = 2'-O-methoxyethyl guanosine
  modified_base 20: mod_base = OTHER; note = 2'-O-methoxyethyl 5-methylcytidine
  misc_feature 1: note = RNA
  misc_feature 2: note = DNA
  misc_feature 3..8: note = RNA
  misc_feature 9..14: note = DNA
  misc_feature 15..20: note = RNA
gcagaggtgaagcgaagtgc

SEQ ID NO: 28 - DNA, 20 bp, synthetic construct
  source 1..20: mol_type = other DNA
  modified_base 1: mod_base = OTHER; note = 2'-O-methoxyethyl guanosine
  modified_base 2: mod_base = OTHER; note = 2'-deoxy 5-methylcytidine
  modified_base 3: mod_base = OTHER; note = Locked nucleic acid with adenine base
  modified_base 4: mod_base = OTHER; note = 2'-O-methoxyethyl guanosine
  modified_base 5: mod_base = OTHER; note = 2'-O-methoxyethyl adenosine
  modified_base 6: mod_base = OTHER; note = 2'-O-methoxyethyl guanosine
  modified_base 13: mod_base = OTHER; note = 2'-deoxy 5-methylcytidine
  modified_base 15: mod_base = OTHER; note = 2'-O-methoxyethyl adenosine
  modified_base 16: mod_base = OTHER; note = Locked nucleic acid with adenine base
  modified_base 17: mod_base = OTHER; note = Locked nucleic acid with guanine base
  modified_base 18: mod_base = OTHER; note = 2'-O-methoxyethyl thymidine
  modified_base 19: mod_base = OTHER; note = 2'-O-methoxyethyl guanosine
  modified_base 20: mod_base = OTHER; note = 2'-O-methoxyethyl 5-methylcytidine
  misc_feature 1: note = RNA
  misc_feature 2: note = DNA
  misc_feature 3..6: note = RNA
  misc_feature 7..14: note = DNA
  misc_feature 15..20: note = RNA
gcagaggtgaagcgaagtgc

SEQ ID NO: 29 - DNA, 20 bp, synthetic construct
  source 1..20: mol_type = other DNA
  modified_base 1: mod_base = OTHER; note = 2'-O-methoxyethyl guanosine
  modified_base 2: mod_base = OTHER; note = 2'-deoxy 5-methylcytidine
  modified_base 3: mod_base = OTHER; note = Locked nucleic acid with adenine base
  modified_base 4: mod_base = OTHER; note = 2'-O-methoxyethyl guanosine
  modified_base 5: mod_base = OTHER; note = 2'-O-methoxyethyl adenosine
  modified_base 6: mod_base = OTHER; note = 2'-O-methoxyethyl guanosine
  modified_base 10: mod_base = OTHER; note = 2'-O-methoxyethyl adenosine
  modified_base 13: mod_base = OTHER; note = 2'-deoxy 5-methylcytidine
  modified_base 15: mod_base = OTHER; note = 2'-O-methoxyethyl adenosine
  modified_base 16: mod_base = OTHER; note = Locked nucleic acid with adenine base
  modified_base 17: mod_base = OTHER; note = Locked nucleic acid with guanine base
  modified_base 18: mod_base = OTHER; note = 2'-O-methoxyethyl thymidine
  modified_base 19: mod_base = OTHER; note = 2'-O-methoxyethyl guanosine
  modified_base 20: mod_base = OTHER; note = 2'-O-methoxyethyl 5-methylcytidine
  misc_feature 1: note = RNA
  misc_feature 2: note = DNA
  misc_feature 3..6: note = RNA
  misc_feature 7..9: note = DNA
  misc_feature 10: note = RNA
  misc_feature 11..14: note = DNA
  misc_feature 15..20: note = RNA
gcagaggtgaagcgaagtgc

SEQ ID NO: 30 - DNA, 19 bp, synthetic construct
  source 1..19: mol_type = other DNA
  modified_base 1: mod_base = OTHER; note = 2'-O-methoxyethyl guanosine
  modified_base 2: mod_base = OTHER; note = 2'-deoxy 5-methylcytidine
  modified_base 3: mod_base = OTHER; note = Locked nucleic acid with adenine base
  modified_base 4: mod_base = OTHER; note = 2'-O-methoxyethyl guanosine
  modified_base 5: mod_base = OTHER; note = 2'-O-methoxyethyl adenosine
  modified_base 6: mod_base = OTHER; note = 2'-O-methoxyethyl guanosine
  modified_base 13: mod_base = OTHER; note = 2'-deoxy 5-methylcytidine
  modified_base 15: mod_base = OTHER; note = 2'-O-methoxyethyl adenosine
  modified_base 16: mod_base = OTHER; note = Locked nucleic acid with adenine base
  modified_base 17: mod_base = OTHER; note = Locked nucleic acid with guanine base
  modified_base 18: mod_base = OTHER; note = 2'-O-methoxyethyl thymidine
  modified_base 19: mod_base = OTHER; note = 2'-O-methoxyethyl guanosine
  misc_feature 1: note = RNA
  misc_feature 2: note = DNA
  misc_feature 3..6: note = RNA
  misc_feature 7..14: note = DNA
  misc_feature 15..19: note = RNA
gcagaggtgaagcgaagtg

SEQ ID NO: 31 - DNA, 18 bp, synthetic construct
  source 1..18: mol_type = other DNA
  modified_base 1: mod_base = OTHER; note = 2'-deoxy 5-methylcytidine
  modified_base 2: mod_base = OTHER; note = Locked nucleic acid with adenine base
  modified_base 3: mod_base = OTHER; note = 2'-O-methoxyethyl guanosine
  modified_base 4: mod_base = OTHER; note = 2'-O-methoxyethyl adenosine
  modified_base 5: mod_base = OTHER; note = 2'-O-methoxyethyl guanosine
  modified_base 12: mod_base = OTHER; note = 2'-deoxy 5-methylcytidine
  modified_base 14: mod_base = OTHER; note = 2'-O-methoxyethyl adenosine
  modified_base 15: mod_base = OTHER; note = Locked nucleic acid with adenine base
  modified_base 16: mod_base = OTHER; note = Locked nucleic acid with guanine base
  modified_base 17: mod_base = OTHER; note = 2'-O-methoxyethyl thymidine
  modified_base 18: mod_base = OTHER; note = 2'-O-methoxyethyl guanosine
  misc_feature 1: note = DNA
  misc_feature 2..5: note = RNA
  misc_feature 6..13: note = DNA
  misc_feature 14..18: note = RNA
cagaggtgaagcgaagtg

SEQ ID NO: 32 - DNA, 16 bp, synthetic construct
  source 1..16: mol_type = other DNA
  modified_base 1: mod_base = OTHER; note = Locked nucleic acid with adenine base
  modified_base 2: mod_base = OTHER; note = 2'-O-methoxyethyl guanosine
  modified_base 3: mod_base = OTHER; note = 2'-O-methoxyethyl adenosine
  modified_base 4: mod_base = OTHER; note = 2'-O-methoxyethyl guanosine
  modified_base 11: mod_base = OTHER; note = 2'-deoxy 5-methylcytidine
  modified_base 13: mod_base = OTHER; note = 2'-O-methoxyethyl adenosine
  modified_base 14: mod_base = OTHER; note = Locked nucleic acid with adenine base
  modified_base 15: mod_base = OTHER; note = Locked nucleic acid with guanine base
  modified_base 16: mod_base = OTHER; note = 2'-O-methoxyethyl thymidine
  misc_feature 1..4: note = RNA
  misc_feature 5..12: note = DNA
  misc_feature 13..16: note = RNA
agaggtgaagcgaagt

SEQ ID NO: 33 - DNA, 20 bp, synthetic construct
  source 1..20: mol_type = other DNA
  modified_base 1: mod_base = OTHER; note = 2'-O-methoxyethyl guanosine
  modified_base 2: mod_base = OTHER; note = 2'-O-methoxyethyl 5-methylcytidine
  modified_base 3: mod_base = OTHER; note = 2'-O-methoxyethyl adenosine
  modified_base 4: mod_base = OTHER; note = 2'-O-methoxyethyl guanosine
  modified_base 5: mod_base = OTHER; note = 2'-O-methoxyethyl adenosine
  modified_base 6: mod_base = OTHER; note = 2'fluoro 2'-deoxy guanosine
  modified_base 7: mod_base = OTHER; note = 2'fluoro 2'-deoxy guanosine
  modified_base 9: mod_base = OTHER; note = 2'fluoro 2'-deoxy guanosine
  modified_base 10: mod_base = OTHER; note = 2'-fluoro 2'-deoxyadenosine
  modified_base 11: mod_base = OTHER; note = 2'-fluoro 2'-deoxyadenosine
  modified_base 12: mod_base = OTHER; note = 2'fluoro 2'-deoxy guanosine
  modified_base 13: mod_base = OTHER; note = 2'fluoro 2'-deoxy cytidine
  modified_base 14: mod_base = OTHER; note = 2'fluoro 2'-deoxy guanosine
  modified_base 15: mod_base = OTHER; note = 2'-fluoro 2'-deoxyadenosine
  modified_base 16: mod_base = OTHER; note = 2'-O-methoxyethyl adenosine
  modified_base 17: mod_base = OTHER; note = 2'-O-methoxyethyl guanosine
  modified_base 18: mod_base = OTHER; note = 2'-O-methoxyethyl thymidine
  modified_base 19: mod_base = OTHER; note = 2'-O-methoxyethyl guanosine
  modified_base 20: mod_base = OTHER; note = 2'-O-methoxyethyl 5-methylcytidine
  misc_feature 1..7: note = RNA
  misc_feature 8: note = DNA
  misc_feature 9..20: note = RNA
gcagaggtgaagcgaagtgc

SEQ ID NO: 34 - DNA, 20 bp, synthetic construct
  source 1..20: mol_type = other DNA
  modified_base 1: mod_base = OTHER; note = 2'-O-methoxyethyl guanosine
  modified_base 2: mod_base = OTHER; note = 2'-O-methoxyethyl 5-methylcytidine
  modified_base 3: mod_base = OTHER; note = 2'-O-methoxyethyl adenosine
  modified_base 4: mod_base = OTHER; note = 2'-O-methoxyethyl guanosine
  modified_base 5: mod_base = OTHER; note = 2'-O-methoxyethyl adenosine
  modified_base 6: mod_base = OTHER; note = 2'fluoro 2'-deoxy guanosine
  modified_base 10: mod_base = OTHER; note = 2'-fluoro 2'-deoxyadenosine
  modified_base 12: mod_base = OTHER; note = 2'fluoro 2'-deoxy guanosine
  modified_base 13: mod_base = OTHER; note = 2'-deoxy 5-methylcytidine
  modified_base 14: mod_base = OTHER; note = 2'fluoro 2'-deoxy guanosine
  modified_base 16: mod_base = OTHER; note = 2'-O-methoxyethyl adenosine
  modified_base 17: mod_base = OTHER; note = 2'-O-methoxyethyl guanosine
  modified_base 18: mod_base = OTHER; note = 2'-O-methoxyethyl thymidine
  modified_base 19: mod_base = OTHER; note = 2'-O-methoxyethyl guanosine
  modified_base 20: mod_base = OTHER; note = 2'-O-methoxyethyl 5-methylcytidine
  misc_feature 1..6: note = RNA
  misc_feature 7..9: note = DNA
  misc_feature 10: note = RNA
  misc_feature 11: note = DNA
  misc_feature 12: note = RNA
  misc_feature 13: note = DNA
  misc_feature 14: note = RNA
  misc_feature 15: note = DNA
  misc_feature 16..20: note = RNA
gcagaggtgaagcgaagtgc

SEQ ID NO: 35 - DNA, 20 bp, synthetic construct
  source 1..20: mol_type = other DNA
  modified_base 1: mod_base = OTHER; note = 2'-O-methoxyethyl guanosine
  modified_base 2: mod_base = OTHER; note = 2'-O-methoxyethyl 5-methylcytidine
  modified_base 3: mod_base = OTHER; note = 2'-O-methoxyethyl adenosine
  modified_base 4: mod_base = OTHER; note = 2'-O-methoxyethyl guanosine
  modified_base 5: mod_base = OTHER; note = 2'-O-methoxyethyl adenosine
  modified_base 6: mod_base = OTHER; note = 2'fluoro 2'-deoxy guanosine
  modified_base 10: mod_base = OTHER; note = 2'-fluoro 2'-deoxyadenosine
  modified_base 13: mod_base = OTHER; note = 2'-deoxy 5-methylcytidine
  modified_base 14: mod_base = OTHER; note = 2'fluoro 2'-deoxy guanosine
  modified_base 16: mod_base = OTHER; note = 2'-O-methoxyethyl adenosine
  modified_base 17: mod_base = OTHER; note = 2'-O-methoxyethyl guanosine
  modified_base 18: mod_base = OTHER; note = 2'-O-methoxyethyl thymidine
  modified_base 19: mod_base = OTHER; note = 2'-O-methoxyethyl guanosine
  modified_base 20: mod_base = OTHER; note = 2'-O-methoxyethyl 5-methylcytidine
  misc_feature 1..6: note = RNA
  misc_feature 7..9: note = DNA
  misc_feature 10: note = RNA
  misc_feature 11..13: note = DNA
  misc_feature 14: note = RNA
  misc_feature 15: note = DNA
  misc_feature 16..20: note = RNA
gcagaggtgaagcgaagtgc

SEQ ID NO: 36 - DNA, 20 bp, synthetic construct
  source 1..20: mol_type = other DNA
  modified_base 1: mod_base = OTHER; note = 2'fluoro 2'-deoxy guanosine
  modified_base 2: mod_base = OTHER; note = 2'-deoxy 5-methylcytidine
  modified_base 3: mod_base = OTHER; note = 2'-fluoro 2'-deoxyadenosine
  modified_base 5: mod_base = OTHER; note = 2'-fluoro 2'-deoxyadenosine
  modified_base 7: mod_base = OTHER; note = 2'fluoro 2'-deoxy guanosine
  modified_base 9: mod_base = OTHER; note = 2'fluoro 2'-deoxy guanosine
  modified_base 11: mod_base = OTHER; note = 2'-O-methoxyethyl adenosine
  modified_base 12: mod_base = OTHER; note = 2'-O-methoxyethyl guanosine
  modified_base 13: mod_base = OTHER; note = 2'-O-methoxyethyl 5-methylcytidine
  modified_base 14: mod_base = OTHER; note = 2'-O-methoxyethyl guanosine
  modified_base 15: mod_base = OTHER; note = 2'-O-methoxyethyl adenosine
  modified_base 16: mod_base = OTHER; note = 2'-O-methoxyethyl adenosine
  modified_base 17: mod_base = OTHER; note = 2'-O-methoxyethyl guanosine
  modified_base 18: mod_base = OTHER; note = 2'-O-methoxyethyl thymidine
  modified_base 19: mod_base = OTHER; note = 2'-O-methoxyethyl guanosine
  modified_base 20: mod_base = OTHER; note = 2'-O-methoxyethyl 5-methylcytidine
  misc_feature 1: note = RNA
  misc_feature 2: note = DNA
  misc_feature 3: note = RNA
  misc_feature 4: note = DNA
  misc_feature 5: note = RNA
  misc_feature 6: note = DNA
  misc_feature 7: note = RNA
  misc_feature 8: note = DNA
  misc_feature 9: note = RNA
  misc_feature 10: note = DNA
  misc_feature 11..20: note = RNA
gcagaggtgaagcgaagtgc

SEQ ID NO: 37 - DNA, 20 bp, synthetic construct
  source 1..20: mol_type = other DNA
  modified_base 1: mod_base = OTHER; note = 2'-O-methoxyethyl guanosine
  modified_base 2: mod_base = OTHER; note = 2'-O-methoxyethyl adenosine
  modified_base 3: mod_base = OTHER; note = 2'-O-methoxyethyl 5-methylcytidine
  modified_base 4: mod_base = OTHER; note = 2'-O-methoxyethyl guanosine
  modified_base 5: mod_base = OTHER; note = 2'-O-methoxyethyl thymidine
  modified_base 7: mod_base = OTHER; note = 2'-deoxy 5-methylcytidine
  modified_base 16: mod_base = OTHER; note = 2'-O-methoxyethyl adenosine
  modified_base 17: mod_base = OTHER; note = 2'-O-methoxyethyl guanosine
  modified_base 18: mod_base = OTHER; note = 2'-O-methoxyethyl 5-methylcytidine
  modified_base 19: mod_base = OTHER; note = 2'-O-methoxyethyl guanosine
  modified_base 20: mod_base = OTHER; note = 2'-O-methoxyethyl adenosine
  misc_feature 1..5: note = RNA
  misc_feature 6..15: note = DNA
  misc_feature 16..20: note = RNA
gacgtgcagaggtgaagcga

SEQ ID NO: 38 - DNA, 20 bp, synthetic construct
  source 1..20: mol_type = other DNA
  modified_base 1: mod_base = OTHER; note = 2'-O-methoxyethyl adenosine
  modified_base 2: mod_base = OTHER; note = 2'-O-methoxyethyl 5-methylcytidine
  modified_base 3: mod_base = OTHER; note = 2'-O-methoxyethyl guanosine
  modified_base 4: mod_base = OTHER; note = 2'-O-methoxyethyl thymidine
  modified_base 5: mod_base = OTHER; note = 2'-O-methoxyethyl guanosine
  modified_base 6: mod_base = OTHER; note = 2'-deoxy 5-methylcytidine
  modified_base 16: mod_base = OTHER; note = 2'-O-methoxyethyl guanosine
  modified_base 17: mod_base = OTHER; note = 2'-O-methoxyethyl 5-methylcytidine
  modified_base 18: mod_base = OTHER; note = 2'-O-methoxyethyl guanosine
  modified_base 19: mod_base = OTHER; note = 2'-O-methoxyethyl adenosine
  modified_base 20: mod_base = OTHER; note = 2'-O-methoxyethyl adenosine
  misc_feature 1..5: note = RNA
  misc_feature 6..15: note = DNA
  misc_feature 16..20: note = RNA
acgtgcagaggtgaagcgaa

SEQ ID NO: 39 - DNA, 20 bp, synthetic construct
  source 1..20: mol_type = other DNA
  modified_base 1: mod_base = OTHER; note = 2'-O-methoxyethyl 5-methylcytidine
  modified_base 2: mod_base = OTHER; note = 2'-O-methoxyethyl guanosine
  modified_base 3: mod_base = OTHER; note = 2'-O-methoxyethyl thymidine
  modified_base 4: mod_base = OTHER; note = 2'-O-methoxyethyl guanosine
  modified_base 5: mod_base = OTHER; note = 2'-O-methoxyethyl 5-methylcytidine
  modified_base 16: mod_base = OTHER; note = 2'-O-methoxyethyl 5-methylcytidine
  modified_base 17: mod_base = OTHER; note = 2'-O-methoxyethyl guanosine
  modified_base 18: mod_base = OTHER; note = 2'-O-methoxyethyl adenosine
  modified_base 19: mod_base = OTHER; note = 2'-O-methoxyethyl adenosine
  modified_base 20: mod_base = OTHER; note = 2'-O-methoxyethyl guanosine
  misc_feature 1..5: note = RNA
  misc_feature 6..15: note = DNA
  misc_feature 16..20: note = RNA
cgtgcagaggtgaagcgaag

SEQ ID NO: 40 - DNA, 20 bp, synthetic construct
  source 1..20: mol_type = other DNA
  modified_base 1: mod_base = OTHER; note = 2'-O-methoxyethyl guanosine
  modified_base 2: mod_base = OTHER; note = 2'-O-methoxyethyl thymidine
  modified_base 3: mod_base = OTHER; note = 2'-O-methoxyethyl guanosine
  modified_base 4: mod_base = OTHER; note = 2'-O-methoxyethyl 5-methylcytidine
  modified_base 5: mod_base = OTHER; note = 2'-O-methoxyethyl adenosine
  modified_base 15: mod_base = OTHER; note = 2'-deoxy 5-methylcytidine
  modified_base 16: mod_base = OTHER; note = 2'-O-methoxyethyl guanosine
  modified_base 17: mod_base = OTHER; note = 2'-O-methoxyethyl adenosine
  modified_base 18: mod_base = OTHER; note = 2'-O-methoxyethyl adenosine
  modified_base 19: mod_base = OTHER; note = 2'-O-methoxyethyl guanosine
  modified_base 20: mod_base = OTHER; note = 2'-O-methoxyethyl thymidine
  misc_feature 1..5: note = RNA
  misc_feature 6..15: note = DNA
  misc_feature 16..20: note = RNA
gtgcagaggtgaagcgaagt

SEQ ID NO: 41 - DNA, 20 bp, synthetic construct
  source 1..20: mol_type = other DNA
  modified_base 1: mod_base = OTHER; note = 2'-O-methoxyethyl thymidine
  modified_base 2: mod_base = OTHER; note = 2'-O-methoxyethyl guanosine
  modified_base 3: mod_base = OTHER; note = 2'-O-methoxyethyl 5-methylcytidine
  modified_base 4: mod_base = OTHER; note = 2'-O-methoxyethyl adenosine
  modified_base 5: mod_base = OTHER; note = 2'-O-methoxyethyl guanosine
  modified_base 14: mod_base = OTHER; note = 2'-deoxy 5-methylcytidine
  modified_base 16: mod_base = OTHER; note = 2'-O-methoxyethyl adenosine
  modified_base 17: mod_base = OTHER; note = 2'-O-methoxyethyl adenosine
  modified_base 18: mod_base = OTHER; note = 2'-O-methoxyethyl guanosine
  modified_base 19: mod_base = OTHER; note = 2'-O-methoxyethyl thymidine
  modified_base 20: mod_base = OTHER; note = 2'-O-methoxyethyl guanosine
  misc_feature 1..5: note = RNA
  misc_feature 6..15: note = DNA
  misc_feature 16..20: note = RNA
tgcagaggtgaagcgaagtg

SEQ ID NO: 42 - DNA, 20 bp, synthetic construct
  source 1..20: mol_type = other DNA
  modified_base 1: mod_base = OTHER; note = 2'-O-methoxyethyl guanosine
  modified_base 2: mod_base = OTHER; note = 2'-O-methoxyethyl 5-methylcytidine
  modified_base 3: mod_base = OTHER; note = 2'-O-methoxyethyl adenosine
  modified_base 4: mod_base = OTHER; note = 2'-O-methoxyethyl guanosine
  modified_base 5: mod_base = OTHER; note = 2'-O-methoxyethyl adenosine
  modified_base 10: mod_base = OTHER; note = 2'-O-methoxyethyl adenosine
  modified_base 13: mod_base = OTHER; note = 2'-deoxy 5-methylcytidine
  modified_base 16: mod_base = OTHER; note = 2'-O-methoxyethyl adenosine
  modified_base 17: mod_base = OTHER; note = 2'-O-methoxyethyl guanosine
  modified_base 18: mod_base = OTHER; note = 2'-O-methoxyethyl thymidine
  modified_base 19: mod_base = OTHER; note = 2'-O-methoxyethyl guanosine
  modified_base 20: mod_base = OTHER; note = 2'-O-methoxyethyl 5-methylcytidine
  misc_feature 1..5: note = RNA
  misc_feature 6..9: note = DNA
  misc_feature 10: note = RNA
  misc_feature 11..15: note = DNA
  misc_feature 16..20: note = RNA
gcagaggtgaagcgaagtgc

SEQ ID NO: 43 - DNA, 20 bp, synthetic construct
  source 1..20: mol_type = other DNA
  modified_base 1: mod_base = OTHER; note = 2'-O-methoxyethyl guanosine
  modified_base 2: mod_base = OTHER; note = 2'-O-methoxyethyl 5-methylcytidine
  modified_base 3: mod_base = OTHER; note = 2'-O-methoxyethyl adenosine
  modified_base 4: mod_base = OTHER; note = 2'-O-methoxyethyl guanosine
  modified_base 5: mod_base = OTHER; note = 2'-O-methoxyethyl adenosine
  modified_base 10: mod_base = OTHER; note = 2'-fluoro 2'-deoxyadenosine
  modified_base 13: mod_base = OTHER; note = 2'-deoxy 5-methylcytidine
  modified_base 16: mod_base = OTHER; note = 2'-O-methoxyethyl adenosine
  modified_base 17: mod_base = OTHER; note = 2'-O-methoxyethyl guanosine
  modified_base 18: mod_base = OTHER; note = 2'-O-methoxyethyl thymidine
  modified_base 19: mod_base = OTHER; note = 2'-O-methoxyethyl guanosine
  modified_base 20: mod_base = OTHER; note = 2'-O-methoxyethyl 5-methylcytidine
  misc_feature 1..5: note = RNA
  misc_feature 6..9: note = DNA
  misc_feature 10: note = RNA
  misc_feature 11..15: note = DNA
  misc_feature 16..20: note = RNA
gcagaggtgaagcgaagtgc

SEQ ID NO: 44 - DNA, 20 bp, synthetic construct
  source 1..20: mol_type = other DNA
  modified_base 1: mod_base = OTHER; note = 2'-O-methoxyethyl guanosine
  modified_base 2: mod_base = OTHER; note = 2'-O-methoxyethyl 5-methylcytidine
  modified_base 3: mod_base = OTHER; note = 2'-O-methoxyethyl adenosine
  modified_base 4: mod_base = OTHER; note = 2'-O-methoxyethyl guanosine
  modified_base 5: mod_base = OTHER; note = 2'-O-methoxyethyl adenosine
  modified_base 10: mod_base = OTHER; note = Locked nucleic acid with adenine base
  modified_base 13: mod_base = OTHER; note = 2'-deoxy 5-methylcytidine
  modified_base 16: mod_base = OTHER; note = 2'-O-methoxyethyl adenosine
  modified_base 17: mod_base = OTHER; note = 2'-O-methoxyethyl guanosine
  modified_base 18: mod_base = OTHER; note = 2'-O-methoxyethyl thymidine
  modified_base 19: mod_base = OTHER; note = 2'-O-methoxyethyl guanosine
  modified_base 20: mod_base = OTHER; note = 2'-O-methoxyethyl 5-methylcytidine
  misc_feature 1..5: note = RNA
  misc_feature 6..9: note = DNA
  misc_feature 10: note = RNA
  misc_feature 11..15: note = DNA
  misc_feature 16..20: note = RNA
gcagaggtgaagcgaagtgc

SEQ ID NO: 45 - DNA, 20 bp, synthetic construct
  source 1..20: mol_type = other DNA
  modified_base 1: mod_base = OTHER; note = 2'-O-methoxyethyl guanosine
  modified_base 2: mod_base = OTHER; note = 2'-O-methoxyethyl 5-methylcytidine
  modified_base 3: mod_base = OTHER; note = 2'-O-methoxyethyl adenosine
  modified_base 4: mod_base = OTHER; note = 2'-O-methoxyethyl guanosine
  modified_base 5: mod_base = OTHER; note = 2'-O-methoxyethyl adenosine
  modified_base 13: mod_base = OTHER; note = 2'-deoxy 5-methylcytidine
  modified_base 15: mod_base = OTHER; note = 2'-O-methoxyethyl adenosine
  modified_base 16: mod_base = OTHER; note = 2'-O-methoxyethyl adenosine
  modified_base 17: mod_base = OTHER; note = 2'-O-methoxyethyl guanosine
  modified_base 18: mod_base = OTHER; note = 2'-O-methoxyethyl thymidine
  modified_base 19: mod_base = OTHER; note = 2'-O-methoxyethyl guanosine
  modified_base 20: mod_base = OTHER; note = 2'-O-methoxyethyl 5-methylcytidine
  misc_feature 1..5: note = RNA
  misc_feature 6..14: note = DNA
  misc_feature 15..20: note = RNA
gcagaggtgaagcgaagtgc

SEQ ID NO: 46 - DNA, 20 bp, synthetic construct
  source 1..20: mol_type = other DNA
  modified_base 1: mod_base = OTHER; note = 2'-O-methoxyethyl guanosine
  modified_base 2: mod_base = OTHER; note = 2'-O-methoxyethyl 5-methylcytidine
  modified_base 3: mod_base = OTHER; note = 2'-O-methoxyethyl adenosine
  modified_base 4: mod_base = OTHER; note = 2'-O-methoxyethyl guanosine
  modified_base 5: mod_base = OTHER; note = 2'-O-methoxyethyl adenosine
  modified_base 13: mod_base = OTHER; note = 2'-deoxy 5-methylcytidine
  modified_base 14: mod_base = OTHER; note = 2'-O-methoxyethyl guanosine
  modified_base 16: mod_base = OTHER; note = 2'-O-methoxyethyl adenosine
  modified_base 17: mod_base = OTHER; note = 2'-O-methoxyethyl guanosine
  modified_base 18: mod_base = OTHER; note = 2'-O-methoxyethyl thymidine
  modified_base 19: mod_base = OTHER; note = 2'-O-methoxyethyl guanosine
  modified_base 20: mod_base = OTHER; note = 2'-O-methoxyethyl 5-methylcytidine
  misc_feature 1..5: note = RNA
  misc_feature 6..13: note = DNA
  misc_feature 14: note = RNA
  misc_feature 15: note = DNA
  misc_feature 16..20: note = RNA
gcagaggtgaagcgaagtgc

SEQ ID NO: 47 - DNA, 20 bp, synthetic construct
  source 1..20: mol_type = other DNA
  modified_base 1: mod_base = OTHER; note = 2'-O-methoxyethyl guanosine
  modified_base 2: mod_base = OTHER; note = 2'-O-methoxyethyl 5-methylcytidine
  modified_base 3: mod_base = OTHER; note = 2'-O-methoxyethyl adenosine
  modified_base 4: mod_base = OTHER; note = 2'-O-methoxyethyl guanosine
  modified_base 5: mod_base = OTHER; note = 2'-O-methoxyethyl adenosine
  modified_base 13: mod_base = OTHER; note = 2'-O-methoxyethyl 5-methylcytidine
  modified_base 16: mod_base = OTHER; note = 2'-O-methoxyethyl adenosine
  modified_base 17: mod_base = OTHER; note = 2'-O-methoxyethyl guanosine
  modified_base 18: mod_base = OTHER; note = 2'-O-methoxyethyl thymidine
  modified_base 19: mod_base = OTHER; note = 2'-O-methoxyethyl guanosine
  modified_base 20: mod_base = OTHER; note = 2'-O-methoxyethyl 5-methylcytidine
  misc_feature 1..5: note = RNA
  misc_feature 6..12: note = DNA
  misc_feature 13: note = RNA
  misc_feature 14..15: note = DNA
  misc_feature 16..20: note = RNA
gcagaggtgaagcgaagtgc

SEQ ID NO: 48 - DNA, 20 bp, synthetic construct
  source 1..20: mol_type = other DNA
  modified_base 1: mod_base = OTHER; note = 2'-O-methoxyethyl guanosine
  modified_base 2: mod_base = OTHER; note = 2'-O-methoxyethyl 5-methylcytidine
  modified_base 3: mod_base = OTHER; note = 2'-O-methoxyethyl adenosine
  modified_base 4: mod_base = OTHER; note = 2'-O-methoxyethyl guanosine
  modified_base 5: mod_base = OTHER; note = 2'-O-methoxyethyl adenosine
  modified_base 12: mod_base = OTHER; note = 2'-O-methoxyethyl guanosine
  modified_base 13: mod_base = OTHER; note = 2'-deoxy 5-methylcytidine
  modified_base 16: mod_base = OTHER; note = 2'-O-methoxyethyl adenosine
  modified_base 17: mod_base = OTHER; note = 2'-O-methoxyethyl guanosine
  modified_base 18: mod_base = OTHER; note = 2'-O-methoxyethyl thymidine
  modified_base 19: mod_base = OTHER; note = 2'-O-methoxyethyl guanosine
  modified_base 20: mod_base = OTHER; note = 2'-O-methoxyethyl 5-methylcytidine
  misc_feature 1..5: note = RNA
  misc_feature 6..11: note = DNA
  misc_feature 12: note = RNA
  misc_feature 13..15: note = DNA
  misc_feature 16..20: note = RNA
gcagaggtgaagcgaagtgc

SEQ ID NO: 49 - DNA, 20 bp, synthetic construct
  source 1..20: mol_type = other DNA
  modified_base 1: mod_base = OTHER; note = 2'-O-methoxyethyl guanosine
  modified_base 2: mod_base = OTHER; note = 2'-O-methoxyethyl 5-methylcytidine
  modified_base 3: mod_base = OTHER; note = 2'-O-methoxyethyl adenosine
  modified_base 4: mod_base = OTHER; note = 2'-O-methoxyethyl guanosine
  modified_base 5: mod_base = OTHER; note = 2'-O-methoxyethyl adenosine
  modified_base 11: mod_base = OTHER; note = 2'-O-methoxyethyl adenosine
  modified_base 13: mod_base = OTHER; note = 2'-deoxy 5-methylcytidine
  modified_base 16: mod_base = OTHER; note = 2'-O-methoxyethyl adenosine
  modified_base 17: mod_base = OTHER; note = 2'-O-methoxyethyl guanosine
  modified_base 18: mod_base = OTHER; note = 2'-O-methoxyethyl thymidine
  modified_base 19: mod_base = OTHER; note = 2'-O-methoxyethyl guanosine
  modified_base 20: mod_base = OTHER; note = 2'-O-methoxyethyl 5-methylcytidine
  misc_feature 1..5: note = RNA
  misc_feature 6..10: note = DNA
  misc_feature 11: note = RNA
  misc_feature 12..15: note = DNA
  misc_feature 16..20: note = RNA
gcagaggtgaagcgaagtgc

SEQ ID NO: 50 - DNA, 20 bp, synthetic construct
  source 1..20: mol_type = other DNA
  modified_base 1: mod_base = OTHER; note = 2'-O-methoxyethyl guanosine
  modified_base 2: mod_base = OTHER; note = 2'-O-methoxyethyl 5-methylcytidine
  modified_base 3: mod_base = OTHER; note = 2'-O-methoxyethyl adenosine
  modified_base 4: mod_base = OTHER; note = 2'-O-methoxyethyl guanosine
  modified_base 5: mod_base = OTHER; note = 2'-O-methoxyethyl adenosine
  modified_base 10: mod_base = OTHER; note = 2'-O-methoxyethyl adenosine
  modified_base 13: mod_base = OTHER; note = 2'-deoxy 5-methylcytidine
  modified_base 16: mod_base = OTHER; note = 2'-O-methoxyethyl adenosine
  modified_base 17: mod_base = OTHER; note = 2'-O-methoxyethyl guanosine
  modified_base 18: mod_base = OTHER; note = 2'-O-methoxyethyl thymidine
  modified_base 19: mod_base = OTHER; note = 2'-O-methoxyethyl guanosine
  modified_base 20: mod_base = OTHER; note = 2'-O-methoxyethyl 5-methylcytidine
  misc_feature 1..5: note = RNA
  misc_feature 6..9: note = DNA
  misc_feature 10: note = RNA
  misc_feature 11..15: note = DNA
  misc_feature 16..20: note = RNA
gcagaggtgaagcgaagtgc

SEQ ID NO: 51 - DNA, 20 bp, synthetic construct
  source 1..20: mol_type = other DNA
  modified_base 1: mod_base = OTHER; note = 2'-O-methoxyethyl guanosine
  modified_base 2: mod_base = OTHER; note = 2'-O-methoxyethyl 5-methylcytidine
  modified_base 3: mod_base = OTHER; note = 2'-O-methoxyethyl adenosine
  modified_base 4: mod_base = OTHER; note = 2'-O-methoxyethyl guanosine
  modified_base 5: mod_base = OTHER; note = 2'-O-methoxyethyl adenosine
  modified_base 9: mod_base = OTHER; note = 2'-O-methoxyethyl guanosine
  modified_base 13: mod_base = OTHER; note = 2'-deoxy 5-methylcytidine
  modified_base 16: mod_base = OTHER; note = 2'-O-methoxyethyl adenosine
  modified_base 17: mod_base = OTHER; note = 2'-O-methoxyethyl guanosine
  modified_base 18: mod_base = OTHER; note = 2'-O-methoxyethyl thymidine
  modified_base 19: mod_base = OTHER; note = 2'-O-methoxyethyl guanosine
  modified_base 20: mod_base = OTHER; note = 2'-O-methoxyethyl 5-methylcytidine
  misc_feature 1..5: note = RNA
  misc_feature 6..8: note = DNA
  misc_feature 9: note = RNA
  misc_feature 10..15: note = DNA
  misc_feature 16..20: note = RNA
gcagaggtgaagcgaagtgc

SEQ ID NO: 52 - DNA, 20 bp, synthetic construct
  source 1..20: mol_type = other DNA
  modified_base 1: mod_base = OTHER; note = 2'-O-methoxyethyl guanosine
  modified_base 2: mod_base = OTHER; note = 2'-O-methoxyethyl 5-methylcytidine
  modified_base 3: mod_base = OTHER; note = 2'-O-methoxyethyl adenosine
  modified_base 4: mod_base = OTHER; note = 2'-O-methoxyethyl guanosine
  modified_base 5: mod_base = OTHER; note = 2'-O-methoxyethyl adenosine
  modified_base 8: mod_base = OTHER; note = 2'-O-methoxyethyl thymidine
  modified_base 13: mod_base = OTHER; note = 2'-deoxy 5-methylcytidine
  modified_base 16: mod_base = OTHER; note = 2'-O-methoxyethyl adenosine
  modified_base 17: mod_base = OTHER; note = 2'-O-methoxyethyl guanosine
  modified_base 18: mod_base = OTHER; note = 2'-O-methoxyethyl thymidine
  modified_base 19: mod_base = OTHER; note = 2'-O-methoxyethyl guanosine
  modified_base 20: mod_base = OTHER; note = 2'-O-methoxyethyl 5-methylcytidine
  misc_feature 1..5: note = RNA
  misc_feature 6..7: note = DNA
  misc_feature 8: note = RNA
  misc_feature 9..15: note = DNA
  misc_feature 16..20: note = RNA
gcagaggtgaagcgaagtgc

SEQ ID NO: 53 - DNA, 20 bp, synthetic construct
  source 1..20: mol_type = other DNA
  modified_base 1: mod_base = OTHER; note = 2'-O-methoxyethyl guanosine
  modified_base 2: mod_base = OTHER; note = 2'-O-methoxyethyl 5-methylcytidine
  modified_base 3: mod_base = OTHER; note = 2'-O-methoxyethyl adenosine
  modified_base 4: mod_base = OTHER; note = 2'-O-methoxyethyl guanosine
  modified_base 5: mod_base = OTHER; note = 2'-O-methoxyethyl adenosine
  modified_base 7: mod_base = OTHER; note = 2'-O-methoxyethyl guanosine
  modified_base 13: mod_base = OTHER; note = 2'-deoxy 5-methylcytidine
  modified_base 16: mod_base = OTHER; note = 2'-O-methoxyethyl adenosine
  modified_base 17: mod_base = OTHER; note = 2'-O-methoxyethyl guanosine
  modified_base 18: mod_base = OTHER; note = 2'-O-methoxyethyl thymidine
  modified_base 19: mod_base = OTHER; note = 2'-O-methoxyethyl guanosine
  modified_base 20: mod_base = OTHER; note = 2'-O-methoxyethyl 5-methylcytidine
  misc_feature 1..5: note = RNA
  misc_feature 6: note = DNA
  misc_feature 7: note = RNA
  misc_feature 8..15: note = DNA
  misc_feature 16..20: note = RNA
gcagaggtgaagcgaagtgc

SEQ ID NO: 54 - DNA, 20 bp, synthetic construct
  source 1..20: mol_type = other DNA
  modified_base 1: mod_base = OTHER; note = 2'-O-methoxyethyl guanosine
  modified_base 2: mod_base = OTHER; note = 2'-O-methoxyethyl 5-methylcytidine
  modified_base 3: mod_base = OTHER; note = 2'-O-methoxyethyl adenosine
  modified_base 4: mod_base = OTHER; note = 2'-O-methoxyethyl guanosine
  modified_base 5: mod_base = OTHER; note = 2'-O-methoxyethyl adenosine
  modified_base 6: mod_base = OTHER; note = 2'-O-methoxyethyl guanosine
  modified_base 13: mod_base = OTHER; note = 2'-deoxy 5-methylcytidine
  modified_base 16: mod_base = OTHER; note = 2'-O-methoxyethyl adenosine
  modified_base 17: mod_base = OTHER; note = 2'-O-methoxyethyl guanosine
  modified_base 18: mod_base = OTHER; note = 2'-O-methoxyethyl thymidine
  modified_base 19: mod_base = OTHER; note = 2'-O-methoxyethyl guanosine
  modified_base 20: mod_base = OTHER; note = 2'-O-methoxyethyl 5-methylcytidine
  misc_feature 1..6: note = RNA
  misc_feature 7..15: note = DNA
  misc_feature 16..20: note = RNA
gcagaggtgaagcgaagtgc

SEQ ID NO: 55 - DNA, 20 bp, synthetic construct
  source 1..20: mol_type = other DNA
  modified_base 1: mod_base = OTHER; note = 2'-O-methoxyethyl guanosine
  modified_base 2: mod_base = OTHER; note = 2'-O-methoxyethyl 5-methylcytidine
  modified_base 3: mod_base = OTHER; note = 2'-O-methoxyethyl adenosine
  modified_base 4: mod_base = OTHER; note = 2'-O-methoxyethyl guanosine
  modified_base 5: mod_base = OTHER; note = 2'-O-methoxyethyl adenosine
  modified_base 7: mod_base = OTHER; note = 2'-O-methoxyethyl guanosine
  modified_base 13: mod_base = OTHER; note = 2'-deoxy 5-methylcytidine
  modified_base 14: mod_base = OTHER; note = 2'-O-methoxyethyl guanosine
  modified_base 16: mod_base = OTHER; note = 2'-O-methoxyethyl adenosine
  modified_base 17: mod_base = OTHER; note = 2'-O-methoxyethyl guanosine
  modified_base 18: mod_base = OTHER; note = 2'-O-methoxyethyl thymidine
  modified_base 19: mod_base = OTHER; note = 2'-O-methoxyethyl guanosine
  modified_base 20: mod_base = OTHER; note = 2'-O-methoxyethyl 5-methylcytidine
  misc_feature 1..5: note = RNA
  misc_feature 6: note = DNA
  misc_feature 7: note = RNA
  misc_feature 8..13: note = DNA
  misc_feature 14: note = RNA
  misc_feature 15: note = DNA
  misc_feature 16..20: note = RNA
gcagaggtgaagcgaagtgc

SEQ ID NO: 56 - DNA, 20 bp, synthetic construct
  source 1..20: mol_type = other DNA
  modified_base 1: mod_base = OTHER; note = 2'-O-methoxyethyl guanosine
  modified_base 2: mod_base = OTHER; note = 2'-O-methoxyethyl 5-methylcytidine
  modified_base 3: mod_base = OTHER; note = 2'-O-methoxyethyl adenosine
  modified_base 4: mod_base = OTHER; note = 2'-O-methoxyethyl guanosine
  modified_base 5: mod_base = OTHER; note = 2'-O-methoxyethyl adenosine
  modified_base 8: mod_base = OTHER; note = 2'-O-methoxyethyl thymidine
  modified_base 13: mod_base = OTHER; note = 2'-O-methoxyethyl 5-methylcytidine
  modified_base 16: mod_base = OTHER; note = 2'-O-methoxyethyl adenosine
  modified_base 17: mod_base = OTHER; note = 2'-O-methoxyethyl guanosine
  modified_base 18: mod_base = OTHER; note = 2'-O-methoxyethyl thymidine
  modified_base 19: mod_base = OTHER; note = 2'-O-methoxyethyl guanosine
  modified_base 20: mod_base = OTHER; note = 2'-O-methoxyethyl 5-methylcytidine
  misc_feature 1..5: note = RNA
  misc_feature 6..7: note = DNA
  misc_feature 8: note = RNA
  misc_feature 9..12: note = DNA
  misc_feature 13: note = RNA
  misc_feature 14..15: note = DNA
  misc_feature 16..20: note = RNA
gcagaggtgaagcgaagtgc

SEQ ID NO: 57 - DNA, 20 bp, synthetic construct
  source 1..20: mol_type = other DNA
  modified_base 1: mod_base = OTHER; note = 2'-O-methoxyethyl guanosine
  modified_base 2: mod_base = OTHER; note = 2'-O-methoxyethyl 5-methylcytidine
  modified_base 3: mod_base = OTHER; note = 2'-O-methoxyethyl adenosine
  modified_base 4: mod_base = OTHER; note = 2'-O-methoxyethyl guanosine
  modified_base 5: mod_base = OTHER; note = 2'-O-methoxyethyl adenosine
  modified_base 9: mod_base = OTHER; note = 2'-O-methoxyethyl guanosine
  modified_base 12: mod_base = OTHER; note = 2'-O-methoxyethyl guanosine
  modified_base 13: mod_base = OTHER; note = 2'-deoxy 5-methylcytidine
  modified_base 16: mod_base = OTHER; note = 2'-O-methoxyethyl adenosine
  modified_base 17: mod_base = OTHER; note = 2'-O-methoxyethyl guanosine
  modified_base 18: mod_base = OTHER; note = 2'-O-methoxyethyl thymidine
  modified_base 19: mod_base = OTHER; note = 2'-O-methoxyethyl guanosine
  modified_base 20: mod_base = OTHER; note = 2'-O-methoxyethyl 5-methylcytidine
  misc_feature 1..5: note = RNA
  misc_feature 6..8: note = DNA
  misc_feature 9: note = RNA
  misc_feature 10..11: note = DNA
  misc_feature 12: note = RNA
  misc_feature 13..15: note = DNA
  misc_feature 16..20: note = RNA
gcagaggtgaagcgaagtgc

SEQ ID NO: 58 - DNA, 20 bp, synthetic construct
  source 1..20: mol_type = other DNA
  modified_base 1: mod_base = OTHER; note = 2'-O-methoxyethyl guanosine
  modified_base 2: mod_base = OTHER; note = 2'-O-methoxyethyl 5-methylcytidine
  modified_base 3: mod_base = OTHER; note = 2'-O-methoxyethyl adenosine
  modified_base 4: mod_base = OTHER; note = 2'-O-methoxyethyl guanosine
  modified_base 5: mod_base = OTHER; note = 2'-O-methoxyethyl adenosine
  modified_base 10: mod_base = OTHER; note = 2'-O-methoxyethyl adenosine
  modified_base 11: mod_base = OTHER; note = 2'-O-methoxyethyl adenosine
  modified_base 13: mod_base = OTHER; note = 2'-deoxy 5-methylcytidine
  modified_base 16: mod_base = OTHER; note = 2'-O-methoxyethyl adenosine
  modified_base 17: mod_base = OTHER; note = 2'-O-methoxyethyl guanosine
  modified_base 18: mod_base = OTHER; note = 2'-O-methoxyethyl thymidine
  modified_base 19: mod_base = OTHER; note = 2'-O-methoxyethyl guanosine
  modified_base 20: mod_base = OTHER; note = 2'-O-methoxyethyl 5-methylcytidine
  misc_feature 1..5: note = RNA
  misc_feature 6..9: note = DNA
  misc_feature 10..11: note = RNA
  misc_feature 12..15: note = DNA
  misc_feature 16..20: note = RNA
gcagaggtgaagcgaagtgc

SEQ ID NO: 59 - DNA, 20 bp, synthetic construct
  source 1..20: mol_type = other DNA
  modified_base 1: mod_base = OTHER; note = 2'-O-methoxyethyl guanosine
  modified_base 2: mod_base = OTHER; note = 2'-O-methoxyethyl 5-methylcytidine
  modified_base 3: mod_base = OTHER; note = 2'-O-methoxyethyl adenosine
  modified_base 4: mod_base = OTHER; note = 2'-O-methoxyethyl guanosine
  modified_base 5: mod_base = OTHER; note = 2'-O-methoxyethyl adenosine
  modified_base 10: mod_base = OTHER; note = 2'-O-methoxyethyl adenosine
  modified_base 12: mod_base = OTHER; note = 2'-O-methoxyethyl guanosine
  modified_base 13: mod_base = OTHER; note = 2'-deoxy 5-methylcytidine
  modified_base 16: mod_base = OTHER; note = 2'-O-methoxyethyl adenosine
  modified_base 17: mod_base = OTHER; note = 2'-O-methoxyethyl guanosine
  modified_base 18: mod_base = OTHER; note = 2'-O-methoxyethyl thymidine
  modified_base 19: mod_base = OTHER; note = 2'-O-methoxyethyl guanosine
  modified_base 20: mod_base = OTHER; note = 2'-O-methoxyethyl 5-methylcytidine
  misc_feature 1..5: note = RNA
  misc_feature 6..9: note = DNA
  misc_feature 10: note = RNA
  misc_feature 11: note = DNA
  misc_feature 12: note = RNA
  misc_feature 13..15: note = DNA
  misc_feature 16..20: note = RNA
gcagaggtgaagcgaagtgc

SEQ ID NO: 60 - DNA, 20 bp, synthetic construct
  source 1..20: mol_type = other DNA
  modified_base 1: mod_base = OTHER; note = 2'-O-methoxyethyl guanosine
  modified_base 2: mod_base = OTHER; note = 2'-O-methoxyethyl 5-methylcytidine
  modified_base 3: mod_base = OTHER; note = 2'-O-methoxyethyl adenosine
  modified_base 4: mod_base = OTHER; note = 2'-O-methoxyethyl guanosine
  modified_base 5: mod_base = OTHER; note = 2'-O-methoxyethyl adenosine
  modified_base 10: mod_base = OTHER; note = 2'-O-methoxyethyl adenosine
  modified_base 13: mod_base = OTHER; note = 2'-O-methoxyethyl 5-methylcytidine
  modified_base 16: mod_base = OTHER; note = 2'-O-methoxyethyl adenosine
  modified_base 17: mod_base = OTHER; note = 2'-O-methoxyethyl guanosine
  modified_base 18: mod_base = OTHER; note = 2'-O-methoxyethyl thymidine
  modified_base 19: mod_base = OTHER; note = 2'-O-methoxyethyl guanosine
  modified_base 20: mod_base = OTHER; note = 2'-O-methoxyethyl 5-methylcytidine
  misc_feature 1..5: note = RNA
  misc_feature 6..9: note = DNA
  misc_feature 10: note = RNA
  misc_feature 11..12: note = DNA
  misc_feature 13: note = RNA
  misc_feature 14..15: note = DNA
  misc_feature 16..20: note = RNA
gcagaggtgaagcgaagtgc

SEQ ID NO: 61 - DNA, 20 bp, synthetic construct
  source 1..20: mol_type = other DNA
  modified_base 1: mod_base = OTHER; note = 2'-O-methoxyethyl guanosine
  modified_base 2: mod_base = OTHER; note = 2'-O-methoxyethyl 5-methylcytidine
  modified_base 3: mod_base = OTHER; note = 2'-O-methoxyethyl adenosine
  modified_base 4: mod_base = OTHER; note = 2'-O-methoxyethyl guanosine
  modified_base 5: mod_base = OTHER; note = 2'-O-methoxyethyl adenosine
  modified_base 10: mod_base = OTHER; note = 2'-O-methoxyethyl adenosine
  modified_base 13: mod_base = OTHER; note = 2'-deoxy 5-methylcytidine
  modified_base 14: mod_base = OTHER; note = 2'-O-methoxyethyl guanosine
  modified_base 16: mod_base = OTHER; note = 2'-O-methoxyethyl adenosine
  modified_base 17: mod_base = OTHER; note = 2'-O-methoxyethyl guanosine
  modified_base 18: mod_base = OTHER; note = 2'-O-methoxyethyl thymidine
  modified_base 19: mod_base = OTHER; note = 2'-O-methoxyethyl guanosine
  modified_base 20: mod_base = OTHER; note = 2'-O-methoxyethyl 5-methylcytidine
  misc_feature 1..5: note = RNA
  misc_feature 6..9: note = DNA
  misc_feature 10: note = RNA
  misc_feature 11..13: note = DNA
  misc_feature 14: note = RNA
  misc_feature 15: note = DNA
  misc_feature 16..20: note = RNA
gcagaggtgaagcgaagtgc

SEQ ID NO: 62 - DNA, 20 bp, synthetic construct
  source 1..20: mol_type = other DNA
  modified_base 1: mod_base = OTHER; note = 2'-O-methoxyethyl guanosine
  modified_base 2: mod_base = OTHER; note = 2'-O-methoxyethyl 5-methylcytidine
  modified_base 3: mod_base = OTHER; note = 2'-O-methoxyethyl adenosine
  modified_base 4: mod_base = OTHER; note = 2'-O-methoxyethyl guanosine
  modified_base 5: mod_base = OTHER; note = 2'-O-methoxyethyl adenosine
  modified_base 10: mod_base = OTHER; note = 2'-O-methoxyethyl adenosine
  modified_base 13: mod_base = OTHER; note = 2'-deoxy 5-methylcytidine
  modified_base 15: mod_base = OTHER; note = 2'-O-methoxyethyl adenosine
  modified_base 16: mod_base = OTHER; note = 2'-O-methoxyethyl adenosine
  modified_base 17: mod_base = OTHER; note = 2'-O-methoxyethyl guanosine
  modified_base 18: mod_base = OTHER; note = 2'-O-methoxyethyl thymidine
  modified_base 19: mod_base = OTHER; note = 2'-O-methoxyethyl guanosine
  modified_base 20: mod_base = OTHER; note = 2'-O-methoxyethyl 5-methylcytidine
  misc_feature 1..5: note = RNA
  misc_feature 6..9: note = DNA
  misc_feature 10: note = RNA
  misc_feature 11..14: note = DNA
  misc_feature 15..20: note = RNA
gcagaggtgaagcgaagtgc

SEQ ID NO: 63 - DNA, 20 bp, synthetic construct
  source 1..20: mol_type = other DNA
  modified_base 1: mod_base = OTHER; note = 2'-O-methoxyethyl guanosine
  modified_base 2: mod_base = OTHER; note = 2'-O-methoxyethyl 5-methylcytidine
  modified_base 3: mod_base = OTHER; note = 2'-O-methoxyethyl adenosine
  modified_base 4: mod_base = OTHER; note = 2'-O-methoxyethyl guanosine
  modified_base 5: mod_base = OTHER; note = 2'-O-methoxyethyl adenosine
  modified_base 9: mod_base = OTHER; note = 2'-O-methoxyethyl guanosine
  modified_base 11: mod_base = OTHER; note = 2'-O-methoxyethyl adenosine
  modified_base 13: mod_base = OTHER; note = 2'-deoxy 5-methylcytidine
  modified_base 16: mod_base = OTHER; note = 2'-O-methoxyethyl adenosine
  modified_base 17: mod_base = OTHER; note = 2'-O-methoxyethyl guanosine
  modified_base 18: mod_base = OTHER; note = 2'-O-methoxyethyl thymidine
  modified_base 19: mod_base = OTHER; note = 2'-O-methoxyethyl guanosine
  modified_base 20: mod_base = OTHER; note = 2'-O-methoxyethyl 5-methylcytidine
  misc_feature 1..5: note = RNA
  misc_feature 6..8: note = DNA
  misc_feature 9: note = RNA
  misc_feature 10: note = DNA
  misc_feature 11: note = RNA
  misc_feature 12..15: note = DNA
  misc_feature 16..20: note = RNA
gcagaggtgaagcgaagtgc

SEQ ID NO: 64 - DNA, 20 bp, synthetic construct
  source 1..20: mol_type = other DNA
  modified_base 1: mod_base = OTHER; note = 2'-O-methoxyethyl guanosine
  modified_base 2: mod_base = OTHER; note = 2'-O-methoxyethyl 5-methylcytidine
  modified_base 3: mod_base = OTHER; note = 2'-O-methoxyethyl adenosine
  modified_base 4: mod_base = OTHER; note = 2'-O-methoxyethyl guanosine
  modified_base 5: mod_base = OTHER; note = 2'-O-methoxyethyl adenosine
  modified_base 8: mod_base = OTHER; note = 2'-O-methoxyethyl thymidine
  modified_base 11: mod_base = OTHER; note = 2'-O-methoxyethyl adenosine
  modified_base 13: mod_base = OTHER; note = 2'-deoxy 5-methylcytidine
  modified_base 16: mod_base = OTHER; note = 2'-O-methoxyethyl adenosine
  modified_base 17: mod_base = OTHER; note = 2'-O-methoxyethyl guanosine
  modified_base 18: mod_base = OTHER; note = 2'-O-methoxyethyl thymidine
  modified_base 19: mod_base = OTHER; note = 2'-O-methoxyethyl guanosine
  modified_base 20: mod_base = OTHER; note = 2'-O-methoxyethyl 5-methylcytidine
  misc_feature 1..5: note = RNA
  misc_feature 6..7: note = DNA
  misc_feature 8: note = RNA
  misc_feature 9..10: note = DNA
  misc_feature 11: note = RNA
  misc_feature 12..15: note = DNA
  misc_feature 16..20: note = RNA
gcagaggtgaagcgaagtgc

SEQ ID NO: 65 - DNA, 20 bp, synthetic construct
  source 1..20: mol_type = other DNA
  modified_base 1: mod_base = OTHER; note = 2'-O-methoxyethyl guanosine
  modified_base 2: mod_base = OTHER; note = 2'-O-methoxyethyl 5-methylcytidine
  modified_base 3: mod_base = OTHER; note = 2'-O-methoxyethyl adenosine
  modified_base 4: mod_base = OTHER; note = 2'-O-methoxyethyl guanosine
  modified_base 5: mod_base = OTHER; note = 2'-O-methoxyethyl adenosine
  modified_base 7: mod_base = OTHER; note = 2'-O-methoxyethyl guanosine
  modified_base 11: mod_base = OTHER; note = 2'-O-methoxyethyl adenosine
  modified_base 13: mod_base = OTHER; note = 2'-deoxy 5-methylcytidine
  modified_base 16: mod_base = OTHER; note = 2'-O-methoxyethyl adenosine
  modified_base 17: mod_base = OTHER; note = 2'-O-methoxyethyl guanosine
  modified_base 18: mod_base = OTHER; note = 2'-O-methoxyethyl thymidine
  modified_base 19: mod_base = OTHER; note = 2'-O-methoxyethyl guanosine
  modified_base 20: mod_base = OTHER; note = 2'-O-methoxyethyl 5-methylcytidine
  misc_feature 1..5: note = RNA
  misc_feature 6: note = DNA
  misc_feature 7: note = RNA
  misc_feature 8..10: note = DNA
  misc_feature 11: note = RNA
  misc_feature 12..15: note = DNA
  misc_feature 16..20: note = RNA
gcagaggtgaagcgaagtgc

SEQ ID NO: 66 - DNA, 20 bp, synthetic construct
  source 1..20: mol_type = other DNA
  modified_base 1: mod_base = OTHER; note = 2'-O-methoxyethyl guanosine
  modified_base 2: mod_base = OTHER; note = 2'-O-methoxyethyl 5-methylcytidine
  modified_base 3: mod_base = OTHER; note = 2'-O-methoxyethyl adenosine
  modified_base 4: mod_base = OTHER; note = 2'-O-methoxyethyl guanosine
  modified_base 5: mod_base = OTHER; note = 2'-O-methoxyethyl adenosine
  modified_base 6: mod_base = OTHER; note = 2'-O-methoxyethyl guanosine
  modified_base 11: mod_base = OTHER; note = 2'-O-methoxyethyl adenosine
  modified_base 13: mod_base = OTHER; note = 2'-deoxy 5-methylcytidine
  modified_base 16: mod_base = OTHER; note = 2'-O-methoxyethyl adenosine
  modified_base 17: mod_base = OTHER; note = 2'-O-methoxyethyl guanosine
  modified_base 18: mod_base = OTHER; note = 2'-O-methoxyethyl thymidine
  modified_base 19: mod_base = OTHER; note = 2'-O-methoxyethyl guanosine
  modified_base 20: mod_base = OTHER; note = 2'-O-methoxyethyl 5-methylcytidine
  misc_feature 1..6: note = RNA
  misc_feature 7..10: note = DNA
  misc_feature 11: note = RNA
  misc_feature 12..15: note = DNA
  misc_feature 16..20: note = RNA
gcagaggtgaagcgaagtgc

SEQ ID NO: 67 - DNA, 20 bp, synthetic construct
  source 1..20: mol_type = other DNA
  modified_base 1: mod_base = OTHER; note = 2'-O-methoxyethyl guanosine
  modified_base 2: mod_base = OTHER; note = 2'-O-methoxyethyl 5-methylcytidine
  modified_base 3: mod_base = OTHER; note = 2'-O-methoxyethyl adenosine
  modified_base 4: mod_base = OTHER; note = 2'-O-methoxyethyl guanosine
  modified_base 5: mod_base = OTHER; note = 2'-O-methoxyethyl adenosine
  modified_base 7: mod_base = OTHER; note = 2'-O-methoxyethyl guanosine
  modified_base 10: mod_base = OTHER; note = 2'-O-methoxyethyl adenosine
  modified_base 13: mod_base = OTHER; note = 2'-O-methoxyethyl 5-methylcytidine
  modified_base 16: mod_base = OTHER; note = 2'-O-methoxyethyl adenosine
  modified_base 17: mod_base = OTHER; note = 2'-O-methoxyethyl guanosine
  modified_base 18: mod_base = OTHER; note = 2'-O-methoxyethyl thymidine
  modified_base 19: mod_base = OTHER; note = 2'-O-methoxyethyl guanosine
  modified_base 20: mod_base = OTHER; note = 2'-O-methoxyethyl 5-methylcytidine
  misc_feature 1..5: note = RNA
  misc_feature 6: note = DNA
  misc_feature 7: note = RNA
  misc_feature 8..9: note = DNA
  misc_feature 10: note = RNA
  misc_feature 11..12: note = DNA
  misc_feature 13: note = RNA
  misc_feature 14..15: note = DNA
  misc_feature 16..20: note = RNA
gcagaggtgaagcgaagtgc

SEQ ID NO: 68 - DNA, 20 bp, synthetic construct
  source 1..20: mol_type = other DNA
  modified_base 1: mod_base = OTHER; note = 2'-O-methoxyethyl guanosine
  modified_base 2: mod_base = OTHER; note = 2'-O-methoxyethyl 5-methylcytidine
  modified_base 3: mod_base = OTHER; note = 2'-O-methoxyethyl adenosine
  modified_base 4: mod_base = OTHER; note = 2'-O-methoxyethyl guanosine
  modified_base 5: mod_base = OTHER; note = 2'-O-methoxyethyl adenosine
  modified_base 8: mod_base = OTHER; note = 2'-O-methoxyethyl thymidine
  modified_base 11: mod_base = OTHER; note = 2'-O-methoxyethyl adenosine
  modified_base 13: mod_base = OTHER; note = 2'-deoxy 5-methylcytidine
  modified_base 14: mod_base = OTHER; note = 2'-O-methoxyethyl guanosine
  modified_base 16: mod_base = OTHER; note = 2'-O-methoxyethyl adenosine
  modified_base 17: mod_base = OTHER; note = 2'-O-methoxyethyl guanosine
  modified_base 18: mod_base = OTHER; note = 2'-O-methoxyethyl thymidine
  modified_base 19: mod_base = OTHER; note = 2'-O-methoxyethyl guanosine
  modified_base 20: mod_base = OTHER; note = 2'-O-methoxyethyl 5-methylcytidine
  misc_feature 1..5: note = RNA
  misc_feature 6..7: note = DNA
  misc_feature 8: note = RNA
  misc_feature 9..10: note = DNA
  misc_feature 11: note = RNA
  misc_feature 12..13: note = DNA
  misc_feature 14: note = RNA
  misc_feature 15: note = DNA
  misc_feature 16..20: note = RNA
gcagaggtgaagcgaagtgc

SEQ ID NO: 69 - DNA, 40 bp, synthetic construct
  source 1..40: mol_type = other DNA
  modified_base 1: mod_base = OTHER; note = 2'-O-methoxyethyl guanosine
  modified_base 2: mod_base = OTHER; note = 2'-O-methoxyethyl 5-methylcytidine
  modified_base 3: mod_base = OTHER; note = 2'-O-methoxyethyl adenosine
  modified_base 4: mod_base = OTHER; note = 2'-O-methoxyethyl guanosine
  modified_base 5: mod_base = OTHER; note = 2'-O-methoxyethyl adenosine
  modified_base 10: mod_base = OTHER; note = 2'-O-methoxyethyl adenosine
  modified_base 13: mod_base = OTHER; note = 2'-deoxy 5-methylcytidine
  modified_base 16: mod_base = OTHER; note = 2'-O-methoxyethyl adenosine
  modified_base 17: mod_base = OTHER; note = 2'-O-methoxyethyl guanosine
  modified_base 18: mod_base = OTHER; note = 2'-O-methoxyethyl thymidine
  modified_base 19: mod_base = OTHER; note = 2'-O-methoxyethyl guanosine
  modified_base 20: mod_base = OTHER; note = 2'-O-methoxyethyl 5-methylcytidine
  modified_base 21: mod_base = OTHER; note = 2'-O-methoxyethyl adenosine
  modified_base 22: mod_base = OTHER; note = 2'-O-methoxyethyl adenosine
  modified_base 23: mod_base = OTHER; note = 2'-O-methoxyethyl 5-methylcytidine
  modified_base 24: mod_base = OTHER; note = 2'-O-methoxyethyl adenosine
  modified_base 25: mod_base = OTHER; note = 2'-O-methoxyethyl 5-methylcytidine
  modified_base 26: mod_base = OTHER; note = 2'-O-methoxyethyl adenosine
  modified_base 27: mod_base = OTHER; note = 2'-O-methoxyethyl adenosine
  modified_base 28: mod_base = OTHER; note = 2'-O-methoxyethyl 5-methylcytidine
  modified_base 29: mod_base = OTHER; note = 2'-O-methoxyethyl adenosine
  modified_base 30: mod_base = OTHER; note = 2'-O-methoxyethyl 5-methylcytidine
  modified_base 31: mod_base = OTHER; note = 2'-O-methoxyethyl adenosine
  modified_base 32: mod_base = OTHER; note = 2'-O-methoxyethyl adenosine
  modified_base 33: mod_base = OTHER; note = 2'-O-methoxyethyl 5-methylcytidine
  modified_base 34: mod_base = OTHER; note = 2'-O-methoxyethyl adenosine
  modified_base 35: mod_base = OTHER; note = 2'-O-methoxyethyl 5-methylcytidine
  modified_base 36: mod_base = OTHER; note = 2'-O-methoxyethyl adenosine
  modified_base 37: mod_base = OTHER; note = 2'-O-methoxyethyl adenosine
  modified_base 38: mod_base = OTHER; note = 2'-O-methoxyethyl 5-methylcytidine
  modified_base 39: mod_base = OTHER; note = 2'-O-methoxyethyl adenosine
  modified_base 40: mod_base = OTHER; note = 2'-O-methoxyethyl 5-methylcytidine
  misc_feature 1..5: note = RNA
  misc_feature 6..9: note = DNA
  misc_feature 10: note = RNA
  misc_feature 11..15: note = DNA
  misc_feature 16..40: note = RNA
gcagaggtgaagcgaagtgcaacacaacacaacacaacac

SEQ ID NO: 70 - DNA, 40 bp, synthetic construct; identical to SEQ ID NO: 69
  source 1..40: mol_type = other DNA
  modified_base 1: mod_base = OTHER; note = 2'-O-methoxyethyl guanosine
  modified_base 2: mod_base = OTHER; note = 2'-O-methoxyethyl 5-methylcytidine
  modified_base 3: mod_base = OTHER; note = 2'-O-methoxyethyl adenosine
  modified_base 4: mod_base = OTHER; note = 2'-O-methoxyethyl guanosine
  modified_base 5: mod_base = OTHER; note = 2'-O-methoxyethyl adenosine
  modified_base 11: mod_base = OTHER; note = 2'-O-methoxyethyl adenosine
  modified_base 13: mod_base = OTHER; note = 2'-deoxy 5-methylcytidine
  modified_base 16: mod_base = OTHER; note = 2'-O-methoxyethyl adenosine
  modified_base 17: mod_base = OTHER; note = 2'-O-methoxyethyl guanosine
  modified_base 18: mod_base = OTHER; note = 2'-O-methoxyethyl thymidine
  modified_base 19: mod_base = OTHER; note = 2'-O-methoxyethyl guanosine
  modified_base 20: mod_base = OTHER; note = 2'-O-methoxyethyl 5-methylcytidine
  modified_base 21: mod_base = OTHER; note = 2'-O-methoxyethyl adenosine
  modified_base 22: mod_base = OTHER; note = 2'-O-methoxyethyl adenosine
  modified_base 23: mod_base = OTHER; note = 2'-O-methoxyethyl 5-methylcytidine
  modified_base 24: mod_base = OTHER; note = 2'-O-methoxyethyl adenosine
  modified_base 25: mod_base = OTHER; note = 2'-O-methoxyethyl 5-methylcytidine
  modified_base 26: mod_base = OTHER; note = 2'-O-methoxyethyl adenosine
  modified_base 27: mod_base = OTHER; note = 2'-O-methoxyethyl adenosine
  modified_base 28: mod_base = OTHER; note = 2'-O-methoxyethyl 5-methylcytidine
  modified_base 29: mod_base = OTHER; note = 2'-O-methoxyethyl adenosine
  modified_base 30: mod_base = OTHER; note = 2'-O-methoxyethyl 5-methylcytidine
  modified_base 31: mod_base = OTHER; note = 2'-O-methoxyethyl adenosine
  modified_base 32: mod_base = OTHER; note = 2'-O-methoxyethyl adenosine
  modified_base 33: mod_base = OTHER; note = 2'-O-methoxyethyl 5-methylcytidine
  modified_base 34: mod_base = OTHER; note = 2'-O-methoxyethyl adenosine
  modified_base 35: mod_base = OTHER; note = 2'-O-methoxyethyl 5-methylcytidine
  modified_base 36: mod_base = OTHER; note = 2'-O-methoxyethyl adenosine
  modified_base 37: mod_base = OTHER; note = 2'-O-methoxyethyl adenosine
  modified_base 38: mod_base = OTHER; note = 2'-O-methoxyethyl 5-methylcytidine
  modified_base 39: mod_base = OTHER; note = 2'-O-methoxyethyl adenosine
  modified_base 40: mod_base = OTHER; note = 2'-O-methoxyethyl 5-methylcytidine
  misc_feature 1..5: note = RNA
  misc_feature 6..10: note = DNA
  misc_feature 11: note = RNA
  misc_feature 12..15: note = DNA
  misc_feature 16..40: note = RNA

SEQ ID NO: 71 - DNA, 20 bp, synthetic construct
  source 1..20: mol_type = other DNA
  modified_base 1: mod_base = OTHER; note = 2'-O-methoxyethyl guanosine
  modified_base 2: mod_base = OTHER; note = 2'-O-methoxyethyl 5-methylcytidine
  modified_base 3: mod_base = OTHER; note = 2'-O-methoxyethyl adenosine
  modified_base 4: mod_base = OTHER; note = 2'-O-methoxyethyl guanosine
  modified_base 5: mod_base = OTHER; note = 2'-O-methoxyethyl adenosine
  modified_base 6: mod_base = OTHER; note = 2'fluoro 2'-deoxy guanosine
  modified_base 13: mod_base = OTHER; note = 2'-deoxy 5-methylcytidine
  modified_base 14: mod_base = OTHER; note = 2'fluoro 2'-deoxy guanosine
  modified_base 16: mod_base = OTHER; note = 2'-O-methoxyethyl adenosine
  modified_base 17: mod_base = OTHER; note = 2'-O-methoxyethyl guanosine
  modified_base 18: mod_base = OTHER; note = 2'-O-methoxyethyl thymidine
  modified_base 19: mod_base = OTHER; note = 2'-O-methoxyethyl guanosine
  modified_base 20: mod_base = OTHER; note = 2'-O-methoxyethyl 5-methylcytidine
  misc_feature 1..6: note = RNA
  misc_feature 7..13: note = DNA
  misc_feature 14: note = RNA
  misc_feature 15: note = DNA
  misc_feature 16..20: note = RNA
gcagaggtgaagcgaagtgc

SEQ ID NO: 72 - DNA, 20 bp, synthetic construct
  source 1..20: mol_type = other DNA
  modified_base 1: mod_base = OTHER; note = 2'-O-methoxyethyl guanosine
  modified_base 2: mod_base = OTHER; note = 2'-O-methoxyethyl 5-methylcytidine
  modified_base 3: mod_base = OTHER; note = 2'-O-methoxyethyl adenosine
  modified_base 4: mod_base = OTHER; note = 2'-O-methoxyethyl guanosine
  modified_base 5: mod_base = OTHER; note = 2'-O-methoxyethyl adenosine
  modified_base 9: mod_base = OTHER; note = 2'fluoro 2'-deoxy guanosine
  modified_base 13: mod_base = OTHER; note = 2'-deoxy 5-methylcytidine
  modified_base 14: mod_base = OTHER; note = 2'fluoro 2'-deoxy guanosine
  modified_base 16: mod_base = OTHER; note = 2'-O-methoxyethyl adenosine
  modified_base 17: mod_base = OTHER; note = 2'-O-methoxyethyl guanosine
  modified_base 18: mod_base = OTHER; note = 2'-O-methoxyethyl thymidine
  modified_base 19: mod_base = OTHER; note = 2'-O-methoxyethyl guanosine
  modified_base 20: mod_base = OTHER; note = 2'-O-methoxyethyl 5-methylcytidine
  misc_feature 1..5: note = RNA
  misc_feature 6..8: note = DNA
  misc_feature 9: note = RNA
  misc_feature 10..13: note = DNA
  misc_feature 14: note = RNA
  misc_feature 15: note = DNA
  misc_feature 16..20: note = RNA
gcagaggtgaagcgaagtgc

SEQ ID NO: 73 - DNA, 20 bp, synthetic construct
  source 1..20: mol_type = other DNA
  modified_base 1: mod_base = OTHER; note = 2'-O-methoxyethyl guanosine
  modified_base 2: mod_base = OTHER; note = 2'-O-methoxyethyl thymidine
  modified_base 3: mod_base = OTHER; note = 2'-O-methoxyethyl guanosine
  modified_base 4: mod_base = OTHER; note = 2'-O-methoxyethyl adenosine
  modified_base 5: mod_base = OTHER; note = 2'-O-methoxyethyl adenosine
  modified_base 6: mod_base = OTHER; note = 2'-O-methoxyethyl guanosine
  modified_base 7: mod_base = OTHER; note = 2'-deoxy 5-methylcytidine
  modified_base 14: mod_base = OTHER; note = 2'-deoxy 5-methylcytidine
  modified_base 16: mod_base = OTHER; note = 2'-O-methoxyethyl 5-methylcytidine
  modified_base 17: mod_base = OTHER; note = 2'-O-methoxyethyl adenosine
  modified_base 18: mod_base = OTHER; note = 2'-O-methoxyethyl 5-methylcytidine
  modified_base 19: mod_base = OTHER; note = 2'-O-methoxyethyl guanosine
  modified_base 20: mod_base = OTHER; note = 2'-O-methoxyethyl guanosine
  misc_feature 1..6: note = RNA
  misc_feature 7..15: note = DNA
  misc_feature 16..20: note = RNA
gtgaagcgaagtgcacacgg

SEQ ID NO: 74 - DNA, 20 bp, synthetic construct
  source 1..20: mol_type = other DNA
  modified_base 1: mod_base = OTHER; note = 2'-O-methoxyethyl guanosine
  modified_base 2: mod_base = OTHER; note = 2'-O-methoxyethyl thymidine
  modified_base 3: mod_base = OTHER; note = 2'-O-methoxyethyl guanosine
  modified_base 4: mod_base = OTHER; note = 2'-O-methoxyethyl adenosine
  modified_base 5: mod_base = OTHER; note = 2'-O-methoxyethyl adenosine
  modified_base 7: mod_base = OTHER; note = 2'-O-methoxyethyl 5-methylcytidine
  modified_base 14: mod_base = OTHER; note = 2'-deoxy 5-methylcytidine
  modified_base 16: mod_base = OTHER; note = 2'-O-methoxyethyl 5-methylcytidine
  modified_base 17: mod_base = OTHER; note = 2'-O-methoxyethyl adenosine
  modified_base 18: mod_base = OTHER; note = 2'-O-methoxyethyl 5-methylcytidine
  modified_base 19: mod_base = OTHER; note = 2'-O-methoxyethyl guanosine
  modified_base 20: mod_base = OTHER; note = 2'-O-methoxyethyl guanosine
  misc_feature 1..5: note = RNA
  misc_feature 6: note = DNA
  misc_feature 7: note = RNA
  misc_feature 8..15: note = DNA
  misc_feature 16..20: note = RNA
gtgaagcgaagtgcacacgg

SEQ ID NO: 75 - DNA, 20 bp, synthetic construct
  source 1..20: mol_type = other DNA
  modified_base 1: mod_base = OTHER; note = 2'-O-methoxyethyl guanosine
  modified_base 2: mod_base = OTHER; note = 2'-O-methoxyethyl thymidine
  modified_base 3: mod_base = OTHER; note = 2'-O-methoxyethyl guanosine
  modified_base 4: mod_base = OTHER; note = 2'-O-methoxyethyl adenosine
  modified_base 5: mod_base = OTHER; note = 2'-O-methoxyethyl adenosine
  modified_base 7: mod_base = OTHER; note = 2'-deoxy 5-methylcytidine
  modified_base 8: mod_base = OTHER; note = 2'-O-methoxyethyl guanosine
  modified_base 14: mod_base = OTHER; note = 2'-deoxy 5-methylcytidine
  modified_base 16: mod_base = OTHER; note = 2'-O-methoxyethyl 5-methylcytidine
  modified_base 17: mod_base = OTHER; note = 2'-O-methoxyethyl adenosine
  modified_base 18: mod_base = OTHER; note = 2'-O-methoxyethyl 5-methylcytidine
  modified_base 19: mod_base = OTHER; note = 2'-O-methoxyethyl guanosine
  modified_base 20: mod_base = OTHER; note = 2'-O-methoxyethyl guanosine
  misc_feature 1..5: note = RNA
  misc_feature 6..7: note = DNA
  misc_feature 8: note = RNA
  misc_feature 9..15: note = DNA
  misc_feature 16..20: note = RNA
gtgaagcgaagtgcacacgg

SEQ ID NO: 76 - DNA, 20 bp, synthetic construct
  source 1..20: mol_type = other DNA
  modified_base 1: mod_base = OTHER; note = 2'-O-methoxyethyl guanosine
  modified_base 2: mod_base = OTHER; note = 2'-O-methoxyethyl thymidine
  modified_base 3: mod_base = OTHER; note = 2'-O-methoxyethyl guanosine
  modified_base 4: mod_base = OTHER; note = 2'-O-methoxyethyl adenosine
  modified_base 5: mod_base = OTHER; note = 2'-O-methoxyethyl adenosine
  modified_base 7: mod_base = OTHER; note = 2'-deoxy 5-methylcytidine
  modified_base 9: mod_base = OTHER; note = 2'-O-methoxyethyl adenosine
  modified_base 14: mod_base = OTHER; note = 2'-deoxy 5-methylcytidine
  modified_base 16: mod_base = OTHER; note = 2'-O-methoxyethyl 5-methylcytidine
  modified_base 17: mod_base = OTHER; note = 2'-O-methoxyethyl adenosine
  modified_base 18: mod_base = OTHER; note = 2'-O-methoxyethyl 5-methylcytidine
  modified_base 19: mod_base = OTHER; note = 2'-O-methoxyethyl guanosine
  modified_base 20: mod_base = OTHER; note = 2'-O-methoxyethyl guanosine
  misc_feature 1..5: note = RNA
  misc_feature 6..8: note = DNA
  misc_feature 9: note = RNA
  misc_feature 10..15: note = DNA
  misc_feature 16..20: note = RNA
gtgaagcgaagtgcacacgg

SEQ ID NO: 77 - DNA, 20 bp, synthetic construct
  source 1..20: mol_type = other DNA
  modified_base 1: mod_base = OTHER; note = 2'-O-methoxyethyl guanosine
  modified_base 2: mod_base = OTHER; note = 2'-O-methoxyethyl thymidine
  modified_base 3: mod_base = OTHER; note = 2'-O-methoxyethyl guanosine
  modified_base 4: mod_base = OTHER; note = 2'-O-methoxyethyl adenosine
  modified_base 5: mod_base = OTHER; note = 2'-O-methoxyethyl adenosine
  modified_base 7: mod_base = OTHER; note = 2'-deoxy 5-methylcytidine
  modified_base 10: mod_base = OTHER; note = 2'-O-methoxyethyl adenosine
  modified_base 14: mod_base = OTHER; note = 2'-deoxy 5-methylcytidine
  modified_base 16: mod_base = OTHER; note = 2'-O-methoxyethyl 5-methylcytidine
  modified_base 17: mod_base = OTHER; note = 2'-O-methoxyethyl adenosine
  modified_base 18: mod_base = OTHER; note = 2'-O-methoxyethyl 5-methylcytidine
  modified_base 19: mod_base = OTHER; note = 2'-O-methoxyethyl guanosine
  modified_base 20: mod_base = OTHER; note = 2'-O-methoxyethyl guanosine
  misc_feature 1..5: note = RNA
  misc_feature 6..9: note = DNA
  misc_feature 10: note = RNA
  misc_feature 11..15: note = DNA
  misc_feature 16..20: note = RNA
gtgaagcgaagtgcacacgg

SEQ ID NO: 78 - DNA, 20 bp, synthetic construct
  source 1..20: mol_type = other DNA
  modified_base 1: mod_base = OTHER; note = 2'-O-methoxyethyl guanosine
  modified_base 2: mod_base = OTHER; note = 2'-O-methoxyethyl thymidine
  modified_base 3: mod_base = OTHER; note = 2'-O-methoxyethyl guanosine
  modified_base 4: mod_base = OTHER; note = 2'-O-methoxyethyl adenosine
  modified_base 5: mod_base = OTHER; note = 2'-O-methoxyethyl adenosine
  modified_base 7: mod_base = OTHER; note = 2'-deoxy 5-methylcytidine
  modified_base 11: mod_base = OTHER; note = 2'-O-methoxyethyl guanosine
  modified_base 14: mod_base = OTHER; note = 2'-deoxy 5-methylcytidine
  modified_base 16: mod_base = OTHER; note = 2'-O-methoxyethyl 5-methylcytidine
  modified_base 17: mod_base = OTHER; note = 2'-O-methoxyethyl adenosine
  modified_base 18: mod_base = OTHER; note = 2'-O-methoxyethyl 5-methylcytidine
  modified_base 19: mod_base = OTHER; note = 2'-O-methoxyethyl guanosine
  modified_base 20: mod_base = OTHER; note = 2'-O-methoxyethyl guanosine
  misc_feature 1..5: note = RNA
  misc_feature 6..10: note = DNA
  misc_feature 11: note = RNA
  misc_feature 12..15: note = DNA
  misc_feature 16..20: note = RNA
gtgaagcgaagtgcacacgg

SEQ ID NO: 79 - DNA, 20 bp, synthetic construct
  source 1..20: mol_type = other DNA
  modified_base 1: mod_base = OTHER; note = 2'-O-methoxyethyl guanosine
  modified_base 2: mod_base = OTHER; note = 2'-O-methoxyethyl thymidine
  modified_base 3: mod_base = OTHER; note = 2'-O-methoxyethyl guanosine
  modified_base 4: mod_base = OTHER; note = 2'-O-methoxyethyl adenosine
  modified_base 5: mod_base = OTHER; note = 2'-O-methoxyethyl adenosine
  modified_base 7: mod_base = OTHER; note = 2'-deoxy 5-methylcytidine
  modified_base 12: mod_base = OTHER; note = 2'-O-methoxyethyl thymidine
  modified_base 14: mod_base = OTHER; note = 2'-deoxy 5-methylcytidine
  modified_base 16: mod_base = OTHER; note = 2'-O-methoxyethyl 5-methylcytidine
  modified_base 17: mod_base = OTHER; note = 2'-O-methoxyethyl adenosine
  modified_base 18: mod_base = OTHER; note = 2'-O-methoxyethyl 5-methylcytidine
  modified_base 19: mod_base = OTHER; note = 2'-O-methoxyethyl guanosine
  modified_base 20: mod_base = OTHER; note = 2'-O-methoxyethyl guanosine
  misc_feature 1..5: note = RNA
  misc_feature 6..11: note = DNA
  misc_feature 12: note = RNA
  misc_feature 13..15: note = DNA
  misc_feature 16..20: note = RNA
gtgaagcgaagtgcacacgg

SEQ ID NO: 80 - DNA, 20 bp, synthetic construct
  source 1..20: mol_type = other DNA
  modified_base 1: mod_base = OTHER; note = 2'-O-methoxyethyl guanosine
  modified_base 2: mod_base = OTHER; note = 2'-O-methoxyethyl thymidine
  modified_base 3: mod_base = OTHER; note = 2'-O-methoxyethyl guanosine
  modified_base 4: mod_base = OTHER; note = 2'-O-methoxyethyl adenosine
  modified_base 5: mod_base = OTHER; note = 2'-O-methoxyethyl adenosine
  modified_base 7: mod_base = OTHER; note = 2'-deoxy 5-methylcytidine
  modified_base 13: mod_base = OTHER; note = 2'-O-methoxyethyl guanosine
  modified_base 14: mod_base = OTHER; note = 2'-deoxy 5-methylcytidine
  modified_base 16: mod_base = OTHER; note = 2'-O-methoxyethyl 5-methylcytidine
  modified_base 17: mod_base = OTHER; note = 2'-O-methoxyethyl adenosine
  modified_base 18: mod_base = OTHER; note = 2'-O-methoxyethyl 5-methylcytidine
  modified_base 19: mod_base = OTHER; note = 2'-O-methoxyethyl guanosine
  modified_base 20: mod_base = OTHER; note = 2'-O-methoxyethyl guanosine
  misc_feature 1..5: note = RNA
  misc_feature 6..12: note = DNA
  misc_feature 13: note = RNA
  misc_feature 14..15: note = DNA
  misc_feature 16..20: note = RNA
gtgaagcgaagtgcacacgg

SEQ ID NO: 81 - DNA, 20 bp, synthetic construct
  source 1..20: mol_type = other DNA
  modified_base 1: mod_base = OTHER; note = 2'-O-methoxyethyl guanosine
  modified_base 2: mod_base = OTHER; note = 2'-O-methoxyethyl thymidine
  modified_base 3: mod_base = OTHER; note = 2'-O-methoxyethyl guanosine
  modified_base 4: mod_base = OTHER; note = 2'-O-methoxyethyl adenosine
  modified_base 5: mod_base = OTHER; note = 2'-O-methoxyethyl adenosine
  modified_base 7: mod_base = OTHER; note = 2'-deoxy 5-methylcytidine
  modified_base 14: mod_base = OTHER; note = 2'-O-methoxyethyl 5-methylcytidine
  modified_base 16: mod_base = OTHER; note = 2'-O-methoxyethyl 5-methylcytidine
  modified_base 17: mod_base = OTHER; note = 2'-O-methoxyethyl adenosine
  modified_base 18: mod_base = OTHER; note = 2'-O-methoxyethyl 5-methylcytidine
  modified_base 19: mod_base = OTHER; note = 2'-O-methoxyethyl guanosine
  modified_base 20: mod_base = OTHER; note = 2'-O-methoxyethyl guanosine
  misc_feature 1..5: note = RNA
  misc_feature 6..13: note = DNA
  misc_feature 14: note = RNA
  misc_feature 15: note = DNA
  misc_feature 16..20: note = RNA
gtgaagcgaagtgcacacgg

SEQ ID NO: 82 - DNA, 20 bp, synthetic construct
  source 1..20: mol_type = other DNA
  modified_base 1: mod_base = OTHER; note = 2'-O-methoxyethyl guanosine
  modified_base 2: mod_base = OTHER; note = 2'-O-methoxyethyl thymidine
  modified_base 3: mod_base = OTHER; note = 2'-O-methoxyethyl guanosine
  modified_base 4: mod_base = OTHER; note = 2'-O-methoxyethyl adenosine
  modified_base 5: mod_base = OTHER; note = 2'-O-methoxyethyl adenosine
  modified_base 7: mod_base = OTHER; note = 2'-deoxy 5-methylcytidine
  modified_base 14: mod_base = OTHER; note = 2'-deoxy 5-methylcytidine
  modified_base 15: mod_base = OTHER; note = 2'-O-methoxyethyl adenosine
  modified_base 16: mod_base = OTHER; note = 2'-O-methoxyethyl 5-methylcytidine
  modified_base 17: mod_base = OTHER; note = 2'-O-methoxyethyl adenosine
  modified_base 18: mod_base = OTHER; note = 2'-O-methoxyethyl 5-methylcytidine
  modified_base 19: mod_base = OTHER; note = 2'-O-methoxyethyl guanosine
  modified_base 20: mod_base = OTHER; note = 2'-O-methoxyethyl guanosine
  misc_feature 1..5: note = RNA
  misc_feature 6..14: note = DNA
  misc_feature 15..20: note = RNA
gtgaagcgaagtgcacacgg

SEQ ID NO: 83 - DNA, 20 bp, synthetic construct
  source 1..20: mol_type = other DNA
  modified_base 1: mod_base = OTHER; note = 2'-O-methoxyethyl guanosine
  modified_base 2: mod_base = OTHER; note = 2'-O-methoxyethyl thymidine
  modified_base 3: mod_base = OTHER; note = 2'-O-methoxyethyl guanosine
  modified_base 4: mod_base = OTHER; note = 2'-O-methoxyethyl adenosine
  modified_base 5: mod_base = OTHER; note = 2'-O-methoxyethyl adenosine
  modified_base 7: mod_base = OTHER; note = 2'-deoxy 5-methylcytidine
  modified_base 10: mod_base = OTHER; note = 2'-O-methoxyethyl adenosine
  modified_base 11: mod_base = OTHER; note = 2'-O-methoxyethyl guanosine
  modified_base 14: mod_base = OTHER; note = 2'-deoxy 5-methylcytidine
  modified_base 16: mod_base = OTHER; note = 2'-O-methoxyethyl 5-methylcytidine
  modified_base 17: mod_base = OTHER; note = 2'-O-methoxyethyl adenosine
  modified_base 18: mod_base = OTHER; note = 2'-O-methoxyethyl 5-methylcytidine
  modified_base 19: mod_base = OTHER; note = 2'-O-methoxyethyl guanosine
  modified_base 20: mod_base = OTHER; note = 2'-O-methoxyethyl guanosine
  misc_feature 1..5: note = RNA
  misc_feature 6..9: note = DNA
  misc_feature 10..11: note = RNA
  misc_feature 12..15: note = DNA
  misc_feature 16..20: note = RNA
gtgaagcgaagtgcacacgg

SEQ ID NO: 84 - DNA, 20 bp, synthetic construct
  source 1..20: mol_type = other DNA
  modified_base 1: mod_base = OTHER; note = 2'-O-methoxyethyl guanosine
  modified_base 2: mod_base = OTHER; note = 2'-O-methoxyethyl thymidine
  modified_base 3: mod_base = OTHER; note = 2'-O-methoxyethyl guanosine
  modified_base 4: mod_base = OTHER; note = 2'-O-methoxyethyl adenosine
  modified_base 5: mod_base = OTHER; note = 2'-O-methoxyethyl adenosine
  modified_base 7: mod_base = OTHER; note = 2'-deoxy 5-methylcytidine
  modified_base 10: mod_base = OTHER; note = 2'-O-methoxyethyl adenosine
  modified_base 12: mod_base = OTHER; note = 2'-O-methoxyethyl thymidine
  modified_base 14: mod_base = OTHER; note = 2'-deoxy 5-methylcytidine
  modified_base 16: mod_base = OTHER; note = 2'-O-methoxyethyl 5-methylcytidine
  modified_base 17: mod_base = OTHER; note = 2'-O-methoxyethyl adenosine
  modified_base 18: mod_base = OTHER; note = 2'-O-methoxyethyl 5-methylcytidine
  modified_base 19: mod_base = OTHER; note = 2'-O-methoxyethyl guanosine
  modified_base 20: mod_base = OTHER; note = 2'-O-methoxyethyl guanosine
  misc_feature 1..5: note = RNA
  misc_feature 6..9: note = DNA
  misc_feature 10: note = RNA
  misc_feature 11: note = DNA
  misc_feature 12: note = RNA
  misc_feature 13..15: note = DNA
  misc_feature 16..20: note = RNA
gtgaagcgaagtgcacacgg

SEQ ID NO: 85 - DNA, 20 bp, synthetic construct
  source 1..20: mol_type = other DNA
  modified_base 1: mod_base = OTHER; note = 2'-O-methoxyethyl guanosine
  modified_base 2: mod_base = OTHER; note = 2'-O-methoxyethyl thymidine
  modified_base 3: mod_base = OTHER; note = 2'-O-methoxyethyl guanosine
  modified_base 4: mod_base = OTHER; note = 2'-O-methoxyethyl adenosine
  modified_base 5: mod_base = OTHER; note = 2'-O-methoxyethyl adenosine
  modified_base 7: mod_base = OTHER; note = 2'-deoxy 5-methylcytidine
  modified_base 10: mod_base = OTHER; note = 2'-O-methoxyethyl adenosine
  modified_base 13: mod_base = OTHER; note = 2'-O-methoxyethyl guanosine
  modified_base 14: mod_base = OTHER; note = 2'-deoxy 5-methylcytidine
  modified_base 16: mod_base = OTHER; note = 2'-O-methoxyethyl 5-methylcytidine
  modified_base 17: mod_base = OTHER; note = 2'-O-methoxyethyl adenosine
  modified_base 18: mod_base = OTHER; note = 2'-O-methoxyethyl 5-methylcytidine
  modified_base 19: mod_base = OTHER; note = 2'-O-methoxyethyl guanosine
  modified_base 20: mod_base = OTHER; note = 2'-O-methoxyethyl guanosine
  misc_feature 1..5: note = RNA
  misc_feature 6..9: note = DNA
  misc_feature 10: note = RNA
  misc_feature 11..12: note = DNA
  misc_feature 13: note = RNA
  misc_feature 14..15: note = DNA
  misc_feature 16..20: note = RNA
gtgaagcgaagtgcacacgg

SEQ ID NO: 86 - DNA, 20 bp, synthetic construct
  source 1..20: mol_type = other DNA
  modified_base 1: mod_base = OTHER; note = 2'-O-methoxyethyl guanosine
  modified_base 2: mod_base = OTHER; note = 2'-O-methoxyethyl thymidine
  modified_base 3: mod_base = OTHER; note = 2'-O-methoxyethyl guanosine
  modified_base 4: mod_base = OTHER; note = 2'-O-methoxyethyl adenosine
  modified_base 5: mod_base = OTHER; note = 2'-O-methoxyethyl adenosine
  modified_base 7: mod_base = OTHER; note = 2'-deoxy 5-methylcytidine
  modified_base 10: mod_base = OTHER; note = 2'-O-methoxyethyl adenosine
  modified_base 14: mod_base = OTHER; note = 2'-O-methoxyethyl 5-methylcytidine
  modified_base 16: mod_base = OTHER; note = 2'-O-methoxyethyl 5-methylcytidine
  modified_base 17: mod_base = OTHER; note = 2'-O-methoxyethyl adenosine
  modified_base 18: mod_base = OTHER; note = 2'-O-methoxyethyl 5-methylcytidine
  modified_base 19: mod_base = OTHER; note = 2'-O-methoxyethyl guanosine
  modified_base 20: mod_base = OTHER; note = 2'-O-methoxyethyl guanosine
  misc_feature 1..5: note = RNA
  misc_feature 6..9: note = DNA
  misc_feature 10: note = RNA
  misc_feature 11..13: note = DNA
  misc_feature 14: note = RNA
  misc_feature 15: note = DNA
  misc_feature 16..20: note = RNA
gtgaagcgaagtgcacacgg

SEQ ID NO: 87 - DNA, 20 bp, synthetic construct
  source 1..20: mol_type = other DNA
  modified_base 1: mod_base = OTHER; note = 2'-O-methoxyethyl guanosine
  modified_base 2: mod_base = OTHER; note = 2'-O-methoxyethyl thymidine
  modified_base 3: mod_base = OTHER; note = 2'-O-methoxyethyl guanosine
  modified_base 4: mod_base = OTHER; note = 2'-O-methoxyethyl adenosine
  modified_base 5: mod_base = OTHER; note = 2'-O-methoxyethyl adenosine
  modified_base 7: mod_base = OTHER; note = 2'-deoxy 5-methylcytidine
  modified_base 10: mod_base = OTHER; note = 2'-O-methoxyethyl adenosine
  modified_base 14: mod_base = OTHER; note = 2'-deoxy 5-methylcytidine
  modified_base 15: mod_base = OTHER; note = 2'-O-methoxyethyl adenosine
  modified_base 16: mod_base = OTHER; note = 2'-O-methoxyethyl 5-methylcytidine
  modified_base 17: mod_base = OTHER; note = 2'-O-methoxyethyl adenosine
  modified_base 18: mod_base = OTHER; note = 2'-O-methoxyethyl 5-methylcytidine
  modified_base 19: mod_base = OTHER; note = 2'-O-methoxyethyl guanosine
  modified_base 20: mod_base = OTHER; note = 2'-O-methoxyethyl guanosine
  misc_feature 1..5: note = RNA
  misc_feature 6..9: note = DNA
  misc_feature 10: note = RNA
  misc_feature 11..14: note = DNA
  misc_feature 15..20: note = RNA
gtgaagcgaagtgcacacgg

SEQ ID NO: 88 - DNA, 20 bp, synthetic construct
  source 1..20: mol_type = other DNA
  modified_base 1: mod_base = OTHER; note = 2'-O-methoxyethyl guanosine
  modified_base 2: mod_base = OTHER; note = 2'-O-methoxyethyl thymidine
  modified_base 3: mod_base = OTHER; note = 2'-O-methoxyethyl guanosine
  modified_base 4: mod_base = OTHER; note = 2'-O-methoxyethyl adenosine
  modified_base 5: mod_base = OTHER; note = 2'-O-methoxyethyl adenosine
  modified_base 7: mod_base = OTHER; note = 2'-deoxy 5-methylcytidine
  modified_base 9: mod_base = OTHER; note = 2'-O-methoxyethyl adenosine
  modified_base 11: mod_base = OTHER; note = 2'-O-methoxyethyl guanosine
  modified_base 14: mod_base = OTHER; note = 2'-deoxy 5-methylcytidine
  modified_base 16: mod_base = OTHER; note = 2'-O-methoxyethyl 5-methylcytidine
  modified_base 17: mod_base = OTHER; note = 2'-O-methoxyethyl adenosine
  modified_base 18: mod_base = OTHER; note = 2'-O-methoxyethyl 5-methylcytidine
  modified_base 19: mod_base = OTHER; note = 2'-O-methoxyethyl guanosine
  modified_base 20: mod_base = OTHER; note = 2'-O-methoxyethyl guanosine
  misc_feature 1..5: note = RNA
  misc_feature 6..8: note = DNA
  misc_feature 9: note = RNA
  misc_feature 10: note = DNA
  misc_feature 11: note = RNA
  misc_feature 12..15: note = DNA
  misc_feature 16..20: note = RNA
gtgaagcgaagtgcacacgg

SEQ ID NO: 89 - DNA, 20 bp, synthetic construct
  source 1..20: mol_type = other DNA
  modified_base 1: mod_base = OTHER; note = 2'-O-methoxyethyl guanosine
  modified_base 2: mod_base = OTHER; note = 2'-O-methoxyethyl thymidine
  modified_base 3: mod_base = OTHER; note = 2'-O-methoxyethyl guanosine
  modified_base 4: mod_base = OTHER; note = 2'-O-methoxyethyl adenosine
  modified_base 5: mod_base = OTHER; note = 2'-O-methoxyethyl adenosine
  modified_base 7: mod_base = OTHER; note = 2'-deoxy 5-methylcytidine
  modified_base 8: mod_base = OTHER; note = 2'-O-methoxyethyl guanosine
  modified_base 11: mod_base = OTHER; note = 2'-O-methoxyethyl guanosine
  modified_base 14: mod_base = OTHER; note = 2'-deoxy 5-methylcytidine
  modified_base 16: mod_base = OTHER; note = 2'-O-methoxyethyl 5-methylcytidine
  modified_base 17: mod_base = OTHER; note = 2'-O-methoxyethyl adenosine
  modified_base 18: mod_base = OTHER; note = 2'-O-methoxyethyl 5-methylcytidine
  modified_base 19: mod_base = OTHER; note = 2'-O-methoxyethyl guanosine
  modified_base 20: mod_base = OTHER; note = 2'-O-methoxyethyl guanosine
  misc_feature 1..5: note = RNA
  misc_feature 6..7: note = DNA
  misc_feature 8: note = RNA
  misc_feature 9..10: note = DNA
  misc_feature 11: note = RNA
  misc_feature 12..15: note = DNA
  misc_feature 16..20: note = RNA
gtgaagcgaagtgcacacgg

SEQ ID NO: 90 - DNA, 20 bp, synthetic construct
  source 1..20: mol_type = other DNA
  modified_base 1: mod_base = OTHER; note = 2'-O-methoxyethyl guanosine
  modified_base 2: mod_base = OTHER; note = 2'-O-methoxyethyl thymidine
  modified_base 3: mod_base = OTHER; note = 2'-O-methoxyethyl guanosine
  modified_base 4: mod_base = OTHER; note = 2'-O-methoxyethyl adenosine
  modified_base 5: mod_base = OTHER; note = 2'-O-methoxyethyl adenosine
  modified_base 7: mod_base = OTHER; note = 2'-O-methoxyethyl 5-methylcytidine
  modified_base 11: mod_base = OTHER; note = 2'-O-methoxyethyl guanosine
  modified_base 14: mod_base = OTHER; note = 2'-deoxy 5-methylcytidine
  modified_base 16: mod_base = OTHER; note = 2'-O-methoxyethyl 5-methylcytidine
  modified_base 17: mod_base = OTHER; note = 2'-O-methoxyethyl adenosine
  modified_base 18: mod_base = OTHER; note = 2'-O-methoxyethyl 5-methylcytidine
  modified_base 19: mod_base = OTHER; note = 2'-O-methoxyethyl guanosine
  modified_base 20: mod_base = OTHER; note = 2'-O-methoxyethyl guanosine
  misc_feature 1..5: note = RNA
  misc_feature 6: note = DNA
  misc_feature 7: note = RNA
  misc_feature 8..10: note = DNA
  misc_feature 11: note = RNA
  misc_feature 12..15: note = DNA
  misc_feature 16..20: note = RNA
gtgaagcgaagtgcacacgg

SEQ ID NO: 91 - DNA, 20 bp, synthetic construct
  source 1..20: mol_type = other DNA
  modified_base 1: mod_base = OTHER; note = 2'-O-methoxyethyl guanosine
  modified_base 2: mod_base = OTHER; note = 2'-O-methoxyethyl thymidine
  modified_base 3: mod_base = OTHER; note = 2'-O-methoxyethyl guanosine
  modified_base 4: mod_base = OTHER; note = 2'-O-methoxyethyl adenosine
  modified_base 5: mod_base = OTHER; note = 2'-O-methoxyethyl adenosine
  modified_base 6: mod_base = OTHER; note = 2'-O-methoxyethyl guanosine
  modified_base 7: mod_base = OTHER; note = 2'-deoxy 5-methylcytidine
  modified_base 11: mod_base = OTHER; note = 2'-O-methoxyethyl guanosine
  modified_base 14: mod_base = OTHER; note = 2'-deoxy 5-methylcytidine
  modified_base 16: mod_base = OTHER; note = 2'-O-methoxyethyl 5-methylcytidine
  modified_base 17: mod_base = OTHER; note = 2'-O-methoxyethyl adenosine
  modified_base 18: mod_base = OTHER; note = 2'-O-methoxyethyl 5-methylcytidine
  modified_base 19: mod_base = OTHER; note = 2'-O-methoxyethyl guanosine
  modified_base 20: mod_base = OTHER; note = 2'-O-methoxyethyl guanosine
  misc_feature 1..6: note = RNA
  misc_feature 7..10: note = DNA
  misc_feature 11: note = RNA
  misc_feature 12..15: note = DNA
  misc_feature 16..20: note = RNA
gtgaagcgaagtgcacacgg

SEQ ID NO: 92 - DNA, 20 bp, synthetic construct
  source 1..20: mol_type = other DNA
  modified_base 1: mod_base = OTHER; note = 2'-O-methoxyethyl guanosine
  modified_base 2: mod_base = OTHER; note = 2'-O-methoxyethyl thymidine
  modified_base 3: mod_base = OTHER; note = 2'-O-methoxyethyl guanosine
  modified_base 4: mod_base = OTHER; note = 2'-O-methoxyethyl adenosine
  modified_base 5: mod_base = OTHER; note = 2'-O-methoxyethyl adenosine
  modified_base 6: mod_base = OTHER; note = 2'-O-methoxyethyl guanosine
  modified_base 7: mod_base = OTHER; note = 2'-deoxy 5-methylcytidine
  modified_base 10: mod_base = OTHER; note = 2'-O-methoxyethyl adenosine
  modified_base 14: mod_base = OTHER; note = 2'-O-methoxyethyl 5-methylcytidine
  modified_base 16: mod_base = OTHER; note = 2'-O-methoxyethyl 5-methylcytidine
  modified_base 17: mod_base = OTHER; note = 2'-O-methoxyethyl adenosine
  modified_base 18: mod_base = OTHER; note = 2'-O-methoxyethyl 5-methylcytidine
  modified_base 19: mod_base = OTHER; note = 2'-O-methoxyethyl guanosine
  modified_base 20: mod_base = OTHER; note = 2'-O-methoxyethyl guanosine
  misc_feature 1..6: note = RNA
  misc_feature 7..9: note = DNA
  misc_feature 10: note = RNA
  misc_feature 11..13: note = DNA
  misc_feature 14: note = RNA
  misc_feature 15: note = DNA
  misc_feature 16..20: note = RNA
gtgaagcgaagtgcacacgg

SEQ ID NO: 93 - DNA, 20 bp, synthetic construct
  source 1..20: mol_type = other DNA
  modified_base 1: mod_base = OTHER; note = 2'-O-methoxyethyl guanosine
  modified_base 2: mod_base = OTHER; note = 2'-O-methoxyethyl thymidine
  modified_base 3: mod_base = OTHER; note = 2'-O-methoxyethyl guanosine
  modified_base 4: mod_base = OTHER; note = 2'-O-methoxyethyl adenosine
  modified_base 5: mod_base = OTHER; note = 2'-O-methoxyethyl adenosine
  modified_base 7: mod_base = OTHER; note = 2'-O-methoxyethyl 5-methylcytidine
  modified_base 11: mod_base = OTHER; note = 2'-O-methoxyethyl guanosine
  modified_base 14: mod_base = OTHER; note = 2'-deoxy 5-methylcytidine
  modified_base 15: mod_base = OTHER; note = 2'-O-methoxyethyl adenosine
  modified_base 16: mod_base = OTHER; note = 2'-O-methoxyethyl 5-methylcytidine
  modified_base 17: mod_base = OTHER; note = 2'-O-methoxyethyl adenosine
  modified_base 18: mod_base = OTHER; note = 2'-O-methoxyethyl 5-methylcytidine
  modified_base 19: mod_base = OTHER; note = 2'-O-methoxyethyl guanosine
  modified_base 20: mod_base = OTHER; note = 2'-O-methoxyethyl guanosine
  misc_feature 1..5: note = RNA
  misc_feature 6: note = DNA
  misc_feature 7: note = RNA
  misc_feature 8..10: note = DNA
  misc_feature 11: note = RNA
  misc_feature 12..14: note = DNA
  misc_feature 15..20: note = RNA
gtgaagcgaagtgcacacgg

SEQ ID NO: 94 - DNA, 20 bp, synthetic construct
  source 1..20: mol_type = other DNA
  modified_base 1: mod_base = OTHER; note = 2'-O-methoxyethyl guanosine
  modified_base 2: mod_base = OTHER; note = 2'-O-methoxyethyl thymidine
  modified_base 3: mod_base = OTHER; note = 2'-O-methoxyethyl guanosine
  modified_base 4: mod_base = OTHER; note = 2'-O-methoxyethyl adenosine
  modified_base 5: mod_base = OTHER; note = 2'-O-methoxyethyl adenosine
  modified_base 7: mod_base = OTHER; note = 2'-O-methoxyethyl 5-methylcytidine
  modified_base 10: mod_base = OTHER; note = 2'-O-methoxyethyl adenosine
  modified_base 13: mod_base = OTHER; note = 2'-O-methoxyethyl guanosine
  modified_base 14: mod_base = OTHER; note = 2'-deoxy 5-methylcytidine
  modified_base 16: mod_base = OTHER; note = 2'-O-methoxyethyl 5-methylcytidine
  modified_base 17: mod_base = OTHER; note = 2'-O-methoxyethyl adenosine
  modified_base 18: mod_base = OTHER; note = 2'-O-methoxyethyl 5-methylcytidine
  modified_base 19: mod_base = OTHER; note = 2'-O-methoxyethyl guanosine
  modified_base 20: mod_base = OTHER; note = 2'-O-methoxyethyl guanosine
  misc_feature 1..5: note = RNA
  misc_feature 6: note = DNA
  misc_feature 7: note = RNA
  misc_feature 8..9: note = DNA
  misc_feature 10: note = RNA
  misc_feature 11..12: note = DNA
  misc_feature 13: note = RNA
  misc_feature 14..15: note = DNA
  misc_feature 16..20: note = RNA
gtgaagcgaagtgcacacgg

SEQ ID NO: 95 - DNA, 20 bp, synthetic construct
  source 1..20: mol_type = other DNA
  modified_base 1: mod_base = OTHER; note = 2'-O-methoxyethyl guanosine
  modified_base 2: mod_base = OTHER; note = 2'-O-methoxyethyl thymidine
  modified_base 3: mod_base = OTHER; note = 2'-O-methoxyethyl guanosine
  modified_base 4: mod_base = OTHER; note = 2'-O-methoxyethyl adenosine
  modified_base 5: mod_base = OTHER; note = 2'-O-methoxyethyl adenosine
  modified_base 7: mod_base = OTHER; note = 2'-deoxy 5-methylcytidine
  modified_base 8: mod_base = OTHER; note = 2'-O-methoxyethyl guanosine
  modified_base 11: mod_base = OTHER; note = 2'-O-methoxyethyl guanosine
  modified_base 14: mod_base = OTHER; note = 2'-O-methoxyethyl 5-methylcytidine
  modified_base 16: mod_base = OTHER; note = 2'-O-methoxyethyl 5-methylcytidine
  modified_base 17: mod_base = OTHER; note = 2'-O-methoxyethyl adenosine
  modified_base 18: mod_base = OTHER; note = 2'-O-methoxyethyl 5-methylcytidine
  modified_base 19: mod_base = OTHER; note = 2'-O-methoxyethyl guanosine
  modified_base 20: mod_base = OTHER; note = 2'-O-methoxyethyl guanosine
  misc_feature 1..5: note = RNA
  misc_feature 6..7: note = DNA
  misc_feature 8: note = RNA
  misc_feature 9..10: note = DNA
  misc_feature 11: note = RNA
  misc_feature 12..13: note = DNA
  misc_feature 14: note = RNA
  misc_feature 15: note = DNA
  misc_feature 16..20: note = RNA
gtgaagcgaagtgcacacgg

SEQ ID NO: 96 - DNA, 20 bp, synthetic construct
  source 1..20: mol_type = other DNA
  modified_base 1: mod_base = OTHER; note = 2'-O-methoxyethyl guanosine
  modified_base 2: mod_base = OTHER; note = 2'-O-methoxyethyl 5-methylcytidine
  modified_base 3: mod_base = OTHER; note = 2'-O-methoxyethyl adenosine
  modified_base 4: mod_base = OTHER; note = 2'-O-methoxyethyl guanosine
  modified_base 5: mod_base = OTHER; note = 2'-O-methoxyethyl adenosine
  modified_base 6: mod_base = OTHER; note = 2'-OH guanosine
  modified_base 13: mod_base = OTHER; note = 2'-deoxy 5-methylcytidine
  modified_base 16: mod_base = OTHER; note = 2'-O-methoxyethyl adenosine
  modified_base 17: mod_base = OTHER; note = 2'-O-methoxyethyl guanosine
  modified_base 18: mod_base = OTHER; note = 2'-O-methoxyethyl thymidine
  modified_base 19: mod_base = OTHER; note = 2'-O-methoxyethyl guanosine
  modified_base 20: mod_base = OTHER; note = 2'-O-methoxyethyl 5-methylcytidine
  misc_feature 1..6: note = RNA
  misc_feature 7..15: note = DNA
  misc_feature 16..20: note = RNA
gcagaggtgaagcgaagtgc

SEQ ID NO: 97 - DNA, 20 bp, synthetic construct
  source 1..20: mol_type = other DNA
  modified_base 1: mod_base = OTHER; note = 2'-O-methoxyethyl guanosine
  modified_base 2: mod_base = OTHER; note = 2'-O-methoxyethyl 5-methylcytidine
  modified_base 3: mod_base = OTHER; note = 2'-O-methoxyethyl adenosine
  modified_base 4: mod_base = OTHER; note = 2'-O-methoxyethyl guanosine
  modified_base 5: mod_base = OTHER; note = 2'-O-methoxyethyl adenosine
  modified_base 7: mod_base = OTHER; note = 2'-OH guanosine
  modified_base 13: mod_base = OTHER; note = 2'-deoxy 5-methylcytidine
  modified_base 16: mod_base = OTHER; note = 2'-O-methoxyethyl adenosine
  modified_base 17: mod_base = OTHER; note = 2'-O-methoxyethyl guanosine
  modified_base 18: mod_base = OTHER; note = 2'-O-methoxyethyl thymidine
  modified_base 19: mod_base = OTHER; note = 2'-O-methoxyethyl guanosine
  modified_base 20: mod_base = OTHER; note = 2'-O-methoxyethyl 5-methylcytidine
  misc_feature 1..5: note = RNA
  misc_feature 6: note = DNA
  misc_feature 7: note = RNA
  misc_feature 8..15: note = DNA
  misc_feature 16..20: note = RNA
gcagaggtgaagcgaagtgc

SEQ ID NO: 98 - DNA, 20 bp, synthetic construct
  source 1..20: mol_type = other DNA
  modified_base 1: mod_base = OTHER; note = 2'-O-methoxyethyl guanosine
  modified_base 2: mod_base = OTHER; note = 2'-O-methoxyethyl 5-methylcytidine
  modified_base 3: mod_base = OTHER; note = 2'-O-methoxyethyl adenosine
  modified_base 4: mod_base = OTHER; note = 2'-O-methoxyethyl guanosine
  modified_base 5: mod_base = OTHER; note = 2'-O-methoxyethyl adenosine
  modified_base 8: mod_base = OTHER; note = 2'-OH uridine
  modified_base 13: mod_base = OTHER; note = 2'-deoxy 5-methylcytidine
  modified_base 16: mod_base = OTHER; note = 2'-O-methoxyethyl adenosine
  modified_base 17: mod_base = OTHER; note = 2'-O-methoxyethyl guanosine
  modified_base 18: mod_base = OTHER; note = 2'-O-methoxyethyl thymidine
  modified_base 19: mod_base = OTHER; note = 2'-O-methoxyethyl guanosine
  modified_base 20: mod_base = OTHER; note = 2'-O-methoxyethyl 5-methylcytidine
  misc_feature 1..5: note = RNA
  misc_feature 6..7: note = DNA
  misc_feature 8: note = RNA
  misc_feature 9..15: note = DNA
  misc_feature 16..20: note = RNA
gcagaggtgaagcgaagtgc

SEQ ID NO: 99 - DNA, 20 bp, synthetic construct
  source 1..20: mol_type = other DNA
  modified_base 1: mod_base = OTHER; note = 2'-O-methoxyethyl guanosine
  modified_base 2: mod_base = OTHER; note = 2'-O-methoxyethyl 5-methylcytidine
  modified_base 3: mod_base = OTHER; note = 2'-O-methoxyethyl adenosine
  modified_base 4: mod_base = OTHER; note = 2'-O-methoxyethyl guanosine
  modified_base 5: mod_base = OTHER; note = 2'-O-methoxyethyl adenosine
  modified_base 9: mod_base = OTHER; note = 2'-OH guanosine
  modified_base 13: mod_base = OTHER; note = 2'-deoxy 5-methylcytidine
  modified_base 16: mod_base = OTHER; note = 2'-O-methoxyethyl adenosine
  modified_base 17: mod_base = OTHER; note = 2'-O-methoxyethyl guanosine
  modified_base 18: mod_base = OTHER; note = 2'-O-methoxyethyl thymidine
  modified_base 19: mod_base = OTHER; note = 2'-O-methoxyethyl guanosine
  modified_base 20: mod_base = OTHER; note = 2'-O-methoxyethyl 5-methylcytidine
  misc_feature 1..5: note = RNA
  misc_feature 6..8: note = DNA
  misc_feature 9: note = RNA
  misc_feature 10..15: note = DNA
  misc_feature 16..20: note = RNA
gcagaggtgaagcgaagtgc

SEQ ID NO: 100 - DNA, 20 bp, synthetic construct
  source 1..20: mol_type = other DNA
  modified_base 1: mod_base = OTHER; note = 2'-O-methoxyethyl guanosine
  modified_base 2: mod_base = OTHER; note = 2'-O-methoxyethyl 5-methylcytidine
  modified_base 3: mod_base = OTHER; note = 2'-O-methoxyethyl adenosine
  modified_base 4: mod_base = OTHER; note = 2'-O-methoxyethyl guanosine
  modified_base 5: mod_base = OTHER; note = 2'-O-methoxyethyl adenosine
  modified_base 10: mod_base = OTHER; note = 2'-OH adenosine
  modified_base 13: mod_base = OTHER; note = 2'-deoxy 5-methylcytidine
  modified_base 16: mod_base = OTHER; note = 2'-O-methoxyethyl adenosine
  modified_base 17: mod_base = OTHER; note = 2'-O-methoxyethyl guanosine
  modified_base 18: mod_base = OTHER; note = 2'-O-methoxyethyl thymidine
  modified_base 19: mod_base = OTHER; note = 2'-O-methoxyethyl guanosine
  modified_base 20: mod_base = OTHER; note = 2'-O-methoxyethyl 5-methylcytidine
  misc_feature 1..5: note = RNA
  misc_feature 6..9: note = DNA
  misc_feature 10: note = RNA
  misc_feature 11..15: note = DNA
  misc_feature 16..20: note = RNA
gcagaggtgaagcgaagtgc

SEQ ID NO: 101 - DNA, 20 bp, synthetic construct
  source 1..20: mol_type = other DNA
  modified_base 1: mod_base = OTHER; note = 2'-O-methoxyethyl guanosine
  modified_base 2: mod_base = OTHER; note = 2'-O-methoxyethyl 5-methylcytidine
  modified_base 3: mod_base = OTHER; note = 2'-O-methoxyethyl adenosine
  modified_base 4: mod_base = OTHER; note = 2'-O-methoxyethyl guanosine
  modified_base 5: mod_base = OTHER; note = 2'-O-methoxyethyl adenosine
  modified_base 11: mod_base = OTHER; note = 2'-OH adenosine
  modified_base 13: mod_base = OTHER; note = 2'-deoxy 5-methylcytidine
  modified_base 16: mod_base = OTHER; note = 2'-O-methoxyethyl adenosine
  modified_base 17: mod_base = OTHER; note = 2'-O-methoxyethyl guanosine
  modified_base 18: mod_base = OTHER; note = 2'-O-methoxyethyl thymidine
  modified_base 19: mod_base = OTHER; note = 2'-O-methoxyethyl guanosine
  modified_base 20: mod_base = OTHER; note = 2'-O-methoxyethyl 5-methylcytidine
  misc_feature 1..5: note = RNA
  misc_feature 6..10: note = DNA
  misc_feature 11: note = RNA
  misc_feature 12..15: note = DNA
  misc_feature 16..20: note = RNA
gcagaggtgaagcgaagtgc

SEQ ID NO: 102 - DNA, 20 bp, synthetic construct
  source 1..20: mol_type = other DNA
  modified_base 1: mod_base = OTHER; note = 2'-O-methoxyethyl guanosine
  modified_base 2: mod_base = OTHER; note = 2'-O-methoxyethyl 5-methylcytidine
  modified_base 3: mod_base = OTHER; note = 2'-O-methoxyethyl adenosine
  modified_base 4: mod_base = OTHER; note = 2'-O-methoxyethyl guanosine
  modified_base 5: mod_base = OTHER; note = 2'-O-methoxyethyl adenosine
  modified_base 12: mod_base = OTHER; note = 2'-OH guanosine
  modified_base 13: mod_base = OTHER; note = 2'-deoxy 5-methylcytidine
  modified_base 16: mod_base = OTHER; note = 2'-O-methoxyethyl adenosine
  modified_base 17: mod_base = OTHER; note = 2'-O-methoxyethyl guanosine
  modified_base 18: mod_base = OTHER; note = 2'-O-methoxyethyl thymidine
  modified_base 19: mod_base = OTHER; note = 2'-O-methoxyethyl guanosine
  modified_base 20: mod_base = OTHER; note = 2'-O-methoxyethyl 5-methylcytidine
  misc_feature 1..5: note = RNA
  misc_feature 6..11: note = DNA
  misc_feature 12: note = RNA
  misc_feature 13..15: note = DNA
  misc_feature 16..20: note = RNA
gcagaggtgaagcgaagtgc

SEQ ID NO: 103 - DNA, 20 bp, synthetic construct
  source 1..20: mol_type = other DNA
  modified_base 1: mod_base = OTHER; note = 2'-O-methoxyethyl guanosine
  modified_base 2: mod_base = OTHER; note = 2'-O-methoxyethyl 5-methylcytidine
  modified_base 3: mod_base = OTHER; note = 2'-O-methoxyethyl adenosine
  modified_base 4: mod_base = OTHER; note = 2'-O-methoxyethyl guanosine
  modified_base 5: mod_base = OTHER; note = 2'-O-methoxyethyl adenosine
  modified_base 13: mod_base = OTHER; note = 2'-OH 5-methylcytidine
  modified_base 16: mod_base = OTHER; note = 2'-O-methoxyethyl adenosine
  modified_base 17: mod_base = OTHER; note = 2'-O-methoxyethyl guanosine
  modified_base 18: mod_base = OTHER; note = 2'-O-methoxyethyl thymidine
  modified_base 19: mod_base = OTHER; note = 2'-O-methoxyethyl guanosine
  modified_base 20: mod_base = OTHER; note = 2'-O-methoxyethyl 5-methylcytidine
  misc_feature 1..5: note = RNA
  misc_feature 6..12: note = DNA
  misc_feature 13: note = RNA
  misc_feature 14..15: note = DNA
  misc_feature 16..20: note = RNA
gcagaggtgaagcgaagtgc

SEQ ID NO: 104 - DNA, 20 bp, synthetic construct
  source 1..20: mol_type = other DNA
  modified_base 1: mod_base = OTHER; note = 2'-O-methoxyethyl guanosine
  modified_base 2: mod_base = OTHER; note = 2'-O-methoxyethyl 5-methylcytidine
  modified_base 3: mod_base = OTHER; note = 2'-O-methoxyethyl adenosine
  modified_base 4: mod_base = OTHER; note = 2'-O-methoxyethyl guanosine
  modified_base 5: mod_base = OTHER; note = 2'-O-methoxyethyl adenosine
  modified_base 13: mod_base = OTHER; note = 2'-deoxy 5-methylcytidine
  modified_base 14: mod_base = OTHER; note = 2'-OH guanosine
  modified_base 16: mod_base = OTHER; note = 2'-O-methoxyethyl adenosine
  modified_base 17: mod_base = OTHER; note = 2'-O-methoxyethyl guanosine
  modified_base 18: mod_base = OTHER; note = 2'-O-methoxyethyl thymidine
  modified_base 19: mod_base = OTHER; note = 2'-O-methoxyethyl guanosine
  modified_base 20: mod_base = OTHER; note = 2'-O-methoxyethyl 5-methylcytidine
  misc_feature 1..5: note = RNA
  misc_feature 6..13: note = DNA
  misc_feature 14: note = RNA
  misc_feature 15: note = DNA
  misc_feature 16..20: note = RNA
gcagaggtgaagcgaagtgc

SEQ ID NO: 105 - DNA, 20 bp, synthetic construct
  source 1..20: mol_type = other DNA
  modified_base 1: mod_base = OTHER; note = 2'-O-methoxyethyl guanosine
  modified_base 2: mod_base = OTHER; note = 2'-O-methoxyethyl 5-methylcytidine
  modified_base 3: mod_base = OTHER; note = 2'-O-methoxyethyl adenosine
  modified_base 4: mod_base = OTHER; note = 2'-O-methoxyethyl guanosine
  modified_base 5: mod_base = OTHER; note = 2'-O-methoxyethyl adenosine
  modified_base 13: mod_base = OTHER; note = 2'-deoxy 5-methylcytidine
  modified_base 15: mod_base = OTHER; note = 2'-OH adenosine
  modified_base 16: mod_base = OTHER; note = 2'-O-methoxyethyl adenosine
  modified_base 17: mod_base = OTHER; note = 2'-O-methoxyethyl guanosine
  modified_base 18: mod_base = OTHER; note = 2'-O-methoxyethyl thymidine
  modified_base 19: mod_base = OTHER; note = 2'-O-methoxyethyl guanosine
  modified_base 20: mod_base = OTHER; note = 2'-O-methoxyethyl 5-methylcytidine
  misc_feature 1..5: note = RNA
  misc_feature 6..14: note = DNA
  misc_feature 15..20: note = RNA
gcagaggtgaagcgaagtgc

SEQ ID NO: 106 - DNA, 20 bp, synthetic construct
  source 1..20: mol_type = other DNA
  modified_base 1: mod_base = OTHER; note = 2'-O-methoxyethyl guanosine
  modified_base 2: mod_base = OTHER; note = 2'-O-methoxyethyl 5-methylcytidine
  modified_base 3: mod_base = OTHER; note = 2'-O-methoxyethyl adenosine
  modified_base 4: mod_base = OTHER; note = 2'-O-methoxyethyl guanosine
  modified_base 5: mod_base = OTHER; note = 2'-O-methoxyethyl adenosine
  modified_base 13: mod_base = OTHER; note = 2'-deoxy 5-methylcytidine
  modified_base 16: mod_base = OTHER; note = 2'-O-methoxyethyl adenosine
  modified_base 17: mod_base = OTHER; note = 2'-O-methoxyethyl guanosine
  modified_base 18: mod_base = OTHER; note = 2'-O-methoxyethyl thymidine
  modified_base 19: mod_base = OTHER; note = 2'-O-methoxyethyl guanosine
  modified_base 20: mod_base = OTHER; note = 2'-O-methoxyethyl 5-methylcytidine
  misc_feature 1..5: note = RNA
  misc_feature 6..15: note = DNA
  misc_feature 16..20: note = RNA
gcagaggagaagcgaagtgc

SEQ ID NO: 107 - DNA, 20 bp, synthetic construct
  source 1..20: mol_type = other DNA
  modified_base 1: mod_base = OTHER; note = 2'-O-methoxyethyl guanosine
  modified_base 2: mod_base = OTHER; note = 2'-O-methoxyethyl 5-methylcytidine
  modified_base 3: mod_base = OTHER; note = 2'-O-methoxyethyl adenosine
  modified_base 4: mod_base = OTHER; note = 2'-O-methoxyethyl guanosine
  modified_base 5: mod_base = OTHER; note = 2'-O-methoxyethyl adenosine
  modified_base 9: mod_base = OTHER; note = 2'-deoxy 5-methylcytidine
  modified_base 13: mod_base = OTHER; note = 2'-deoxy 5-methylcytidine
  modified_base 16: mod_base = OTHER; note = 2'-O-methoxyethyl adenosine
  modified_base 17: mod_base = OTHER; note = 2'-O-methoxyethyl guanosine
  modified_base 18: mod_base = OTHER; note = 2'-O-methoxyethyl thymidine
  modified_base 19: mod_base = OTHER; note = 2'-O-methoxyethyl guanosine
  modified_base 20: mod_base = OTHER; note = 2'-O-methoxyethyl 5-methylcytidine
  misc_feature 1..5: note = RNA
  misc_feature 6..15: note = DNA
  misc_feature 16..20: note = RNA
gcagaggtcaagcgaagtgc

SEQ ID NO: 108 - DNA, 20 bp, synthetic construct
  source 1..20: mol_type = other DNA
  modified_base 1: mod_base = OTHER; note = 2'-O-methoxyethyl guanosine
  modified_base 2: mod_base = OTHER; note = 2'-O-methoxyethyl 5-methylcytidine
  modified_base 3: mod_base = OTHER; note = 2'-O-methoxyethyl adenosine
  modified_base 4: mod_base = OTHER; note = 2'-O-methoxyethyl guanosine
  modified_base 5: mod_base = OTHER; note = 2'-O-methoxyethyl adenosine
  modified_base 13: mod_base = OTHER; note = 2'-deoxy 5-methylcytidine
  modified_base 16: mod_base = OTHER; note = 2'-O-methoxyethyl adenosine
  modified_base 17: mod_base = OTHER; note = 2'-O-methoxyethyl guanosine
  modified_base 18: mod_base = OTHER; note = 2'-O-methoxyethyl thymidine
  modified_base 19: mod_base = OTHER; note = 2'-O-methoxyethyl guanosine
  modified_base 20: mod_base = OTHER; note = 2'-O-methoxyethyl 5-methylcytidine
  misc_feature 1..5: note = RNA
  misc_feature 6..15: note = DNA
  misc_feature 16..20: note = RNA
gcagaggtgtagcgaagtgc

SEQ ID NO: 109 - DNA, 20 bp, synthetic construct
  source 1..20: mol_type = other DNA
  modified_base 1: mod_base = OTHER; note = 2'-O-methoxyethyl guanosine
  modified_base 2: mod_base = OTHER; note = 2'-O-methoxyethyl 5-methylcytidine
  modified_base 3: mod_base = OTHER; note = 2'-O-methoxyethyl adenosine
  modified_base 4: mod_base = OTHER; note = 2'-O-methoxyethyl guanosine
  modified_base 5: mod_base = OTHER; note = 2'-O-methoxyethyl adenosine
  modified_base 13: mod_base = OTHER; note = 2'-deoxy 5-methylcytidine
  modified_base 16: mod_base = OTHER; note = 2'-O-methoxyethyl adenosine
  modified_base 17: mod_base = OTHER; note = 2'-O-methoxyethyl guanosine
  modified_base 18: mod_base = OTHER; note = 2'-O-methoxyethyl thymidine
  modified_base 19: mod_base = OTHER; note = 2'-O-methoxyethyl guanosine
  modified_base 20: mod_base = OTHER; note = 2'-O-methoxyethyl 5-methylcytidine
  misc_feature 1..5: note = RNA
  misc_feature 6..15: note = DNA
  misc_feature 16..20: note = RNA
gcagaggtgatgcgaagtgc

SEQ ID NO: 110 - DNA, 20 bp, synthetic construct
  source 1..20: mol_type = other DNA
  modified_base 1: mod_base = OTHER; note = 2'-O-methoxyethyl guanosine
  modified_base 2: mod_base = OTHER; note = 2'-O-methoxyethyl 5-methylcytidine
  modified_base 3: mod_base = OTHER; note = 2'-O-methoxyethyl adenosine
  modified_base 4: mod_base = OTHER; note = 2'-O-methoxyethyl guanosine
  modified_base 5: mod_base = OTHER; note = 2'-O-methoxyethyl adenosine
  modified_base 12: mod_base = OTHER; note = 2'-deoxy 5-methylcytidine
  modified_base 13: mod_base = OTHER; note = 2'-deoxy 5-methylcytidine
  modified_base 16: mod_base = OTHER; note = 2'-O-methoxyethyl adenosine
  modified_base 17: mod_base = OTHER; note = 2'-O-methoxyethyl guanosine
  modified_base 18: mod_base = OTHER; note = 2'-O-methoxyethyl thymidine
  modified_base 19: mod_base = OTHER; note = 2'-O-methoxyethyl guanosine
  modified_base 20: mod_base = OTHER; note = 2'-O-methoxyethyl 5-methylcytidine
  misc_feature 1..5: note = RNA
  misc_feature 6..15: note = DNA
  misc_feature 16..20: note = RNA
gcagaggtgaaccgaagtgc

SEQ ID NO: 111 - DNA, 20 bp, synthetic construct
  source 1..20: mol_type = other DNA
  modified_base 1: mod_base = OTHER; note = 2'-O-methoxyethyl guanosine
  modified_base 2: mod_base = OTHER; note = 2'-O-methoxyethyl 5-methylcytidine
  modified_base 3: mod_base = OTHER; note = 2'-O-methoxyethyl adenosine
  modified_base 4: mod_base = OTHER; note = 2'-O-methoxyethyl guanosine
  modified_base 5: mod_base = OTHER; note = 2'-O-methoxyethyl adenosine
  modified_base 16: mod_base = OTHER; note = 2'-O-methoxyethyl adenosine
  modified_base 17: mod_base = OTHER; note = 2'-O-methoxyethyl guanosine
  modified_base 18: mod_base = OTHER; note = 2'-O-methoxyethyl thymidine
  modified_base 19: mod_base = OTHER; note = 2'-O-methoxyethyl guanosine
  modified_base 20: mod_base = OTHER; note = 2'-O-methoxyethyl 5-methylcytidine
  misc_feature 1..5: note = RNA
  misc_feature 6..15: note = DNA
  misc_feature 16..20: note = RNA
gcagaggtgaagggaagtgc

SEQ ID NO: 112 - DNA, 20 bp, synthetic construct
  source 1..20: mol_type = other DNA
  modified_base 1: mod_base = OTHER; note = 2'-O-methoxyethyl guanosine
  modified_base 2: mod_base = OTHER; note = 2'-O-methoxyethyl 5-methylcytidine
  modified_base 3: mod_base = OTHER; note = 2'-O-methoxyethyl adenosine
  modified_base 4: mod_base = OTHER; note = 2'-O-methoxyethyl guanosine
  modified_base 5: mod_base = OTHER; note = 2'-O-methoxyethyl adenosine
  modified_base 13: mod_base = OTHER; note = 2'-deoxy 5-methylcytidine
  modified_base 14: mod_base = OTHER; note = 2'-deoxy 5-methylcytidine
  modified_base 16: mod_base = OTHER; note = 2'-O-methoxyethyl adenosine
  modified_base 17: mod_base = OTHER; note = 2'-O-methoxyethyl guanosine
  modified_base 18: mod_base = OTHER; note = 2'-O-methoxyethyl thymidine
  modified_base 19: mod_base = OTHER; note = 2'-O-methoxyethyl guanosine
  modified_base 20: mod_base = OTHER; note = 2'-O-methoxyethyl 5-methylcytidine
  misc_feature 1..5: note = RNA
  misc_feature 6..15: note = DNA
  misc_feature 16..20: note = RNA
gcagaggtgaagccaagtgc

SEQ ID NO: 113 - DNA, 20 bp, synthetic construct
  source 1..20: mol_type = other DNA
  modified_base 1: mod_base = OTHER; note = 2'-O-methoxyethyl guanosine
  modified_base 2: mod_base = OTHER; note = 2'-O-methoxyethyl 5-methylcytidine
  modified_base 3: mod_base = OTHER; note = 2'-O-methoxyethyl adenosine
  modified_base 4: mod_base = OTHER; note = 2'-O-methoxyethyl guanosine
  modified_base 5: mod_base = OTHER; note = 2'-O-methoxyethyl adenosine
  modified_base 13: mod_base = OTHER; note = 2'-deoxy 5-methylcytidine
  modified_base 16: mod_base = OTHER; note = 2'-O-methoxyethyl adenosine
  modified_base 17: mod_base = OTHER; note = 2'-O-methoxyethyl guanosine
  modified_base 18: mod_base = OTHER; note = 2'-O-methoxyethyl thymidine
  modified_base 19: mod_base = OTHER; note = 2'-O-methoxyethyl guanosine
  modified_base 20: mod_base = OTHER; note = 2'-O-methoxyethyl 5-methylcytidine
  misc_feature 1..5: note = RNA
  misc_feature 6..15: note = DNA
  misc_feature 16..20: note = RNA
gcagaggtgaagcgtagtgc

SEQ ID NO: 114 - DNA, 20 bp, synthetic construct
  source 1..20: mol_type = other DNA
  modified_base 1: mod_base = OTHER; note = 2'-O-methoxyethyl guanosine
  modified_base 2: mod_base = OTHER; note = 2'-O-methoxyethyl 5-methylcytidine
  modified_base 3: mod_base = OTHER; note = 2'-O-methoxyethyl adenosine
  modified_base 4: mod_base = OTHER; note = 2'-O-methoxyethyl guanosine
  modified_base 5: mod_base = OTHER; note = 2'-O-methoxyethyl adenosine
  modified_base 13: mod_base = OTHER; note = 2'-deoxy 5-methylcytidine
  modified_base 16: mod_base = OTHER; note = 2'-O-methoxyethyl thymidine
  modified_base 17: mod_base = OTHER; note = 2'-O-methoxyethyl guanosine
  modified_base 18: mod_base = OTHER; note = 2'-O-methoxyethyl thymidine
  modified_base 19: mod_base = OTHER; note = 2'-O-methoxyethyl guanosine
  modified_base 20: mod_base = OTHER; note = 2'-O-methoxyethyl 5-methylcytidine
  misc_feature 1..5: note = RNA
  misc_feature 6..15: note = DNA
  misc_feature 16..20: note = RNA
gcagaggtgaagcgatgtgc

SEQ ID NO: 115 - DNA, 20 bp, synthetic construct
  source 1..20: mol_type = other DNA
  modified_base 1: mod_base = OTHER; note = 2'-O-methoxyethyl guanosine
  modified_base 2: mod_base = OTHER; note = 2'-O-methoxyethyl 5-methylcytidine
  modified_base 3: mod_base = OTHER; note = 2'-O-methoxyethyl adenosine
  modified_base 4: mod_base = OTHER; note = 2'-O-methoxyethyl guanosine
  modified_base 5: mod_base = OTHER; note = 2'-O-methoxyethyl adenosine
  modified_base 6: mod_base = OTHER; note = 2'-OH guanosine
  modified_base 11: mod_base = OTHER; note = 2'-OH adenosine
  modified_base 13: mod_base = OTHER; note = 2'-deoxy 5-methylcytidine
  modified_base 16: mod_base = OTHER; note = 2'-O-methoxyethyl adenosine
  modified_base 17: mod_base = OTHER; note = 2'-O-methoxyethyl guanosine
  modified_base 18: mod_base = OTHER; note = 2'-O-methoxyethyl thymidine
  modified_base 19: mod_base = OTHER; note = 2'-O-methoxyethyl guanosine
  modified_base 20: mod_base = OTHER; note = 2'-O-methoxyethyl 5-methylcytidine
  misc_feature 1..6: note = RNA
  misc_feature 7..10: note = DNA
  misc_feature 11: note = RNA
  misc_feature 12..15: note = DNA
  misc_feature 16..20: note = RNA
gcagaggtgaagcgaagtgc

SEQ ID NO: 116 - DNA, 20 bp, synthetic construct
  source 1..20: mol_type = other DNA
  modified_base 1: mod_base = OTHER; note = 2'-O-methoxyethyl guanosine
  modified_base 2: mod_base = OTHER; note = 2'-O-methoxyethyl 5-methylcytidine
  modified_base 3: mod_base = OTHER; note = 2'-O-methoxyethyl adenosine
  modified_base 4: mod_base = OTHER; note = 2'-O-methoxyethyl guanosine
  modified_base 5: mod_base = OTHER; note = 2'-O-methoxyethyl adenosine
  modified_base 6: mod_base = OTHER; note = 2'-O-methyl guanosine
  modified_base 13: mod_base = OTHER; note = 2'-deoxy 5-methylcytidine
  modified_base 16: mod_base = OTHER; note = 2'-O-methoxyethyl adenosine
  modified_base 17: mod_base = OTHER; note = 2'-O-methoxyethyl guanosine
  modified_base 18: mod_base = OTHER; note = 2'-O-methoxyethyl thymidine
  modified_base 19: mod_base = OTHER; note = 2'-O-methoxyethyl guanosine
  modified_base 20: mod_base = OTHER; note = 2'-O-methoxyethyl 5-methylcytidine
  misc_feature 1..6: note = RNA
  misc_feature 7..15: note = DNA
  misc_feature 16..20: note = RNA
gcagaggtgaagcgaagtgc

SEQ ID NO: 117 - DNA, 20 bp, synthetic construct
  source 1..20: mol_type = other DNA
  modified_base 1: mod_base = OTHER; note = 2'-O-methoxyethyl guanosine
  modified_base 2: mod_base = OTHER; note = 2'-O-methoxyethyl 5-methylcytidine
  modified_base 3: mod_base = OTHER; note = 2'-O-methoxyethyl adenosine
  modified_base 4: mod_base = OTHER; note = 2'-O-methoxyethyl guanosine
  modified_base 5: mod_base = OTHER; note = 2'-O-methoxyethyl adenosine
  modified_base 7: mod_base = OTHER; note = 2'-O-methyl guanosine
  modified_base 13: mod_base = OTHER; note = 2'-deoxy 5-methylcytidine
  modified_base 16: mod_base = OTHER; note = 2'-O-methoxyethyl adenosine
  modified_base 17: mod_base = OTHER; note = 2'-O-methoxyethyl guanosine
  modified_base 18: mod_base = OTHER; note = 2'-O-methoxyethyl thymidine
  modified_base 19: mod_base = OTHER; note = 2'-O-methoxyethyl guanosine
  modified_base 20: mod_base = OTHER; note = 2'-O-methoxyethyl 5-methylcytidine
  misc_feature 1..5: note = RNA
  misc_feature 6: note = DNA
  misc_feature 7: note = RNA
  misc_feature 8..15: note = DNA
  misc_feature 16..20: note = RNA
gcagaggtgaagcgaagtgc

SEQ ID NO: 118 - DNA, 20 bp, synthetic construct
  source 1..20: mol_type = other DNA
  modified_base 1: mod_base = OTHER; note = 2'-O-methoxyethyl guanosine
  modified_base 2: mod_base = OTHER; note = 2'-O-methoxyethyl 5-methylcytidine
  modified_base 3: mod_base = OTHER; note = 2'-O-methoxyethyl adenosine
  modified_base 4: mod_base = OTHER; note = 2'-O-methoxyethyl guanosine
  modified_base 5: mod_base = OTHER; note = 2'-O-methoxyethyl adenosine
  modified_base 8: mod_base = OTHER; note = 2'-O-methyl uridine
  modified_base 13: mod_base = OTHER; note = 2'-deoxy 5-methylcytidine
  modified_base 16: mod_base = OTHER; note = 2'-O-methoxyethyl adenosine
  modified_base 17: mod_base = OTHER; note = 2'-O-methoxyethyl guanosine
  modified_base 18: mod_base = OTHER; note = 2'-O-methoxyethyl thymidine
  modified_base 19: mod_base = OTHER; note = 2'-O-methoxyethyl guanosine
  modified_base 20: mod_base = OTHER; note = 2'-O-methoxyethyl 5-methylcytidine
  misc_feature 1..5: note = RNA
  misc_feature 6..7: note = DNA
  misc_feature 8: note = RNA
  misc_feature 9..15: note = DNA
  misc_feature 16..20: note = RNA
gcagaggtgaagcgaagtgc

SEQ ID NO: 119 - DNA, 20 bp, synthetic construct
  source 1..20: mol_type = other DNA
  modified_base 1: mod_base = OTHER; note = 2'-O-methoxyethyl guanosine
  modified_base 2: mod_base = OTHER; note = 2'-O-methoxyethyl 5-methylcytidine
  modified_base 3: mod_base = OTHER; note = 2'-O-methoxyethyl adenosine
  modified_base 4: mod_base = OTHER; note = 2'-O-methoxyethyl guanosine
  modified_base 5: mod_base = OTHER; note = 2'-O-methoxyethyl adenosine
  modified_base 9: mod_base = OTHER; note = 2'-O-methyl guanosine
  modified_base 13: mod_base = OTHER; note = 2'-deoxy 5-methylcytidine
  modified_base 16: mod_base = OTHER; note = 2'-O-methoxyethyl adenosine
  modified_base 17: mod_base = OTHER; note = 2'-O-methoxyethyl guanosine
  modified_base 18: mod_base = OTHER; note = 2'-O-methoxyethyl thymidine
  modified_base 19: mod_base = OTHER; note = 2'-O-methoxyethyl guanosine
  modified_base 20: mod_base = OTHER; note = 2'-O-methoxyethyl 5-methylcytidine
  misc_feature 1..5: note = RNA
  misc_feature 6..8: note = DNA
  misc_feature 9: note = RNA
  misc_feature 10..15: note = DNA
  misc_feature 16..20: note = RNA
gcagaggtgaagcgaagtgc

SEQ ID NO: 120 - DNA, 20 bp, synthetic construct
  source 1..20: mol_type = other DNA
  modified_base 1: mod_base = OTHER; note = 2'-O-methoxyethyl guanosine
  modified_base 2: mod_base = OTHER; note = 2'-O-methoxyethyl 5-methylcytidine
  modified_base 3: mod_base = OTHER; note = 2'-O-methoxyethyl adenosine
  modified_base 4: mod_base = OTHER; note = 2'-O-methoxyethyl guanosine
  modified_base 5: mod_base = OTHER; note = 2'-O-methoxyethyl adenosine
  modified_base 10: mod_base = OTHER; note = 2'-O-methyl adenosine
  modified_base 13: mod_base = OTHER; note = 2'-deoxy 5-methylcytidine
  modified_base 16: mod_base = OTHER; note = 2'-O-methoxyethyl adenosine
  modified_base 17: mod_base = OTHER; note = 2'-O-methoxyethyl guanosine
  modified_base 18: mod_base = OTHER; note = 2'-O-methoxyethyl thymidine
  modified_base 19: mod_base = OTHER; note = 2'-O-methoxyethyl guanosine
  modified_base 20: mod_base = OTHER; note = 2'-O-methoxyethyl 5-methylcytidine
  misc_feature 1..5: note = RNA
  misc_feature 6..9: note = DNA
  misc_feature 10: note = RNA
  misc_feature 11..15: note = DNA
  misc_feature 16..20: note = RNA
gcagaggtgaagcgaagtgc

SEQ ID NO: 121 - DNA, 20 bp, synthetic construct
  source 1..20: mol_type = other DNA
  modified_base 1: mod_base = OTHER; note = 2'-O-methoxyethyl guanosine
  modified_base 2: mod_base = OTHER; note = 2'-O-methoxyethyl 5-methylcytidine
  modified_base 3: mod_base = OTHER; note = 2'-O-methoxyethyl adenosine
  modified_base 4: mod_base = OTHER; note = 2'-O-methoxyethyl guanosine
  modified_base 5: mod_base = OTHER; note = 2'-O-methoxyethyl adenosine
  modified_base 11: mod_base = OTHER; note = 2'-O-methyl adenosine
  modified_base 13: mod_base = OTHER; note = 2'-deoxy 5-methylcytidine
  modified_base 16: mod_base = OTHER; note = 2'-O-methoxyethyl adenosine
  modified_base 17: mod_base = OTHER; note = 2'-O-methoxyethyl guanosine
  modified_base 18: mod_base = OTHER; note = 2'-O-methoxyethyl thymidine
  modified_base 19: mod_base = OTHER; note = 2'-O-methoxyethyl guanosine
  modified_base 20: mod_base = OTHER; note = 2'-O-methoxyethyl 5-methylcytidine
  misc_feature 1..5: note = RNA
  misc_feature 6..10: note = DNA
  misc_feature 11: note = RNA
  misc_feature 12..15: note = DNA
  misc_feature 16..20: note = RNA
gcagaggtgaagcgaagtgc

SEQ ID NO: 122 - DNA, 20 bp, synthetic construct
  source 1..20: mol_type = other DNA
  modified_base 1: mod_base = OTHER; note = 2'-O-methoxyethyl guanosine
  modified_base 2: mod_base = OTHER; note = 2'-O-methoxyethyl 5-methylcytidine
  modified_base 3: mod_base = OTHER; note = 2'-O-methoxyethyl adenosine
  modified_base 4: mod_base = OTHER; note = 2'-O-methoxyethyl guanosine
  modified_base 5: mod_base = OTHER; note = 2'-O-methoxyethyl adenosine
  modified_base 12: mod_base = OTHER; note = 2'-O-methyl guanosine
  modified_base 13: mod_base = OTHER; note = 2'-deoxy 5-methylcytidine
  modified_base 16: mod_base = OTHER; note = 2'-O-methoxyethyl adenosine
  modified_base 17: mod_base = OTHER; note = 2'-O-methoxyethyl guanosine
  modified_base 18: mod_base = OTHER; note = 2'-O-methoxyethyl thymidine
  modified_base 19: mod_base = OTHER; note = 2'-O-methoxyethyl guanosine
  modified_base 20: mod_base = OTHER; note = 2'-O-methoxyethyl 5-methylcytidine
  misc_feature 1..5: note = RNA
  misc_feature 6..11: note = DNA
  misc_feature 12: note = RNA
  misc_feature 13..15: note = DNA
  misc_feature 16..20: note = RNA
gcagaggtgaagcgaagtgc

SEQ ID NO: 123 - DNA, 20 bp, synthetic construct
  source 1..20: mol_type = other DNA
  modified_base 1: mod_base = OTHER; note = 2'-O-methoxyethyl guanosine
  modified_base 2: mod_base = OTHER; note = 2'-O-methoxyethyl 5-methylcytidine
  modified_base 3: mod_base = OTHER; note = 2'-O-methoxyethyl adenosine
  modified_base 4: mod_base = OTHER; note = 2'-O-methoxyethyl guanosine
  modified_base 5: mod_base = OTHER; note = 2'-O-methoxyethyl adenosine
  modified_base 13: mod_base = OTHER; note = 2'-O-methyl 5-methylcytidine
  modified_base 16: mod_base = OTHER; note = 2'-O-methoxyethyl adenosine
  modified_base 17: mod_base = OTHER; note = 2'-O-methoxyethyl guanosine
  modified_base 18: mod_base = OTHER; note = 2'-O-methoxyethyl thymidine
  modified_base 19: mod_base = OTHER; note = 2'-O-methoxyethyl guanosine
  modified_base 20: mod_base = OTHER; note = 2'-O-methoxyethyl 5-methylcytidine
  misc_feature 1..5: note = RNA
  misc_feature 6..12: note = DNA
  misc_feature 13: note = RNA
  misc_feature 14..15: note = DNA
  misc_feature 16..20: note = RNA
gcagaggtgaagcgaagtgc

SEQ ID NO: 124 - DNA, 20 bp, synthetic construct
  source 1..20: mol_type = other DNA
  modified_base 1: mod_base = OTHER; note = 2'-O-methoxyethyl guanosine
  modified_base 2: mod_base = OTHER; note = 2'-O-methoxyethyl 5-methylcytidine
  modified_base 3: mod_base = OTHER; note = 2'-O-methoxyethyl adenosine
  modified_base 4: mod_base = OTHER; note = 2'-O-methoxyethyl guanosine
  modified_base 5: mod_base = OTHER; note = 2'-O-methoxyethyl adenosine
  modified_base 13: mod_base = OTHER; note = 2'-deoxy 5-methylcytidine
  modified_base 14: mod_base = OTHER; note = 2'-O-methyl guanosine
  modified_base 16: mod_base = OTHER; note = 2'-O-methoxyethyl adenosine
  modified_base 17: mod_base = OTHER; note = 2'-O-methoxyethyl guanosine
  modified_base 18: mod_base = OTHER; note = 2'-O-methoxyethyl thymidine
  modified_base 19: mod_base = OTHER; note = 2'-O-methoxyethyl guanosine
  modified_base 20: mod_base = OTHER; note = 2'-O-methoxyethyl 5-methylcytidine
  misc_feature 1..5: note = RNA
  misc_feature 6..13: note = DNA
  misc_feature 14: note = RNA
  misc_feature 15: note = DNA
  misc_feature 16..20: note = RNA
gcagaggtgaagcgaagtgc

SEQ ID NO: 125 - DNA, 20 bp, synthetic construct
  source 1..20: mol_type = other DNA
  modified_base 1: mod_base = OTHER; note = 2'-O-methoxyethyl guanosine
  modified_base 2: mod_base = OTHER; note = 2'-O-methoxyethyl 5-methylcytidine
  modified_base 3: mod_base = OTHER; note = 2'-O-methoxyethyl adenosine
  modified_base 4: mod_base = OTHER; note = 2'-O-methoxyethyl guanosine
  modified_base 5: mod_base = OTHER; note = 2'-O-methoxyethyl adenosine
  modified_base 13: mod_base = OTHER; note = 2'-deoxy 5-methylcytidine
  modified_base 15: mod_base = OTHER; note = 2'-O-methyl adenosine
  modified_base 16: mod_base = OTHER; note = 2'-O-methoxyethyl adenosine
  modified_base 17: mod_base = OTHER; note = 2'-O-methoxyethyl guanosine
  modified_base 18: mod_base = OTHER; note = 2'-O-methoxyethyl thymidine
  modified_base 19: mod_base = OTHER; note = 2'-O-methoxyethyl guanosine
  modified_base 20: mod_base = OTHER; note = 2'-O-methoxyethyl 5-methylcytidine
  misc_feature 1..5: note = RNA
  misc_feature 6..14: note = DNA
  misc_feature 15..20: note = RNA
gcagaggtgaagcgaagtgc

SEQ ID NO: 126 - DNA, 20 bp, synthetic construct
  source 1..20: mol_type = other DNA
  modified_base 1: mod_base = OTHER; note = 2'-O-methoxyethyl guanosine
  modified_base 2: mod_base = OTHER; note = 2'-O-methoxyethyl 5-methylcytidine
  modified_base 3: mod_base = OTHER; note = 2'-O-methoxyethyl adenosine
  modified_base 4: mod_base = OTHER; note = 2'-O-methoxyethyl guanosine
  modified_base 5: mod_base = OTHER; note = 2'-O-methoxyethyl adenosine
  modified_base 6: mod_base = OTHER; note = 2'-O-methyl guanosine
  modified_base 11: mod_base = OTHER; note = 2'-O-methyl adenosine
  modified_base 13: mod_base = OTHER; note = 2'-deoxy 5-methylcytidine
  modified_base 16: mod_base = OTHER; note = 2'-O-methoxyethyl adenosine
  modified_base 17: mod_base = OTHER; note = 2'-O-methoxyethyl guanosine
  modified_base 18: mod_base = OTHER; note = 2'-O-methoxyethyl thymidine
  modified_base 19: mod_base = OTHER; note = 2'-O-methoxyethyl guanosine
  modified_base 20: mod_base = OTHER; note = 2'-O-methoxyethyl 5-methylcytidine
  misc_feature 1..6: note = RNA
  misc_feature 7..10: note = DNA
  misc_feature 11: note = RNA
  misc_feature 12..15: note = DNA
  misc_feature 16..20: note = RNA
gcagaggtgaagcgaagtgc

SEQ ID NO: 127 - DNA, 20 bp, synthetic construct
  source 1..20: mol_type = other DNA
  modified_base 1: mod_base = OTHER; note = 2'-O-methoxyethyl guanosine
  modified_base 2: mod_base = OTHER; note = 2'-O-methoxyethyl 5-methylcytidine
  modified_base 3: mod_base = OTHER; note = 2'-O-methoxyethyl adenosine
  modified_base 4: mod_base = OTHER; note = 2'-O-methoxyethyl guanosine
  modified_base 5: mod_base = OTHER; note = 2'-O-methoxyethyl adenosine
  modified_base 10: mod_base = OTHER; note = 2'-O-methyl adenosine
  modified_base 13: mod_base = OTHER; note = 2'-deoxy 5-methylcytidine
  modified_base 15: mod_base = OTHER; note = 2'-O-methyl adenosine
  modified_base 16: mod_base = OTHER; note = 2'-O-methoxyethyl adenosine
  modified_base 17: mod_base = OTHER; note = 2'-O-methoxyethyl guanosine
  modified_base 18: mod_base = OTHER; note = 2'-O-methoxyethyl thymidine
  modified_base 19: mod_base = OTHER; note = 2'-O-methoxyethyl guanosine
  modified_base 20: mod_base = OTHER; note = 2'-O-methoxyethyl 5-methylcytidine
  misc_feature 1..5: note = RNA
  misc_feature 6..9: note = DNA
  misc_feature 10: note = RNA
  misc_feature 11..14: note = DNA
  misc_feature 15..20: note = RNA
gcagaggtgaagcgaagtgc

SEQ ID NO: 128 - DNA, 20 bp, synthetic construct
  source 1..20: mol_type = other DNA
  modified_base 1: mod_base = OTHER; note = 2'-O-methoxyethyl guanosine
  modified_base 2: mod_base = OTHER; note = 2'-O-methoxyethyl guanosine
  modified_base 3: mod_base = OTHER; note = 2'-O-methoxyethyl thymidine
  modified_base 4: mod_base = OTHER; note = 2'-O-methoxyethyl 5-methylcytidine
  modified_base 5: mod_base = OTHER; note = 2'-O-methoxyethyl 5-methylcytidine
  modified_base 8: mod_base = OTHER; note = 2'-deoxy 5-methylcytidine
  modified_base 16: mod_base = OTHER; note = 2'-O-methoxyethyl adenosine
  modified_base 17: mod_base = OTHER; note = 2'-O-methoxyethyl adenosine
  modified_base 18: mod_base = OTHER; note = 2'-O-methoxyethyl guanosine
  modified_base 19: mod_base = OTHER; note = 2'-O-methoxyethyl guanosine
  modified_base 20: mod_base = OTHER; note = 2'-O-methoxyethyl 5-methylcytidine
  misc_feature 1..5: note = RNA
  misc_feature 6..15: note = DNA
  misc_feature 16..20: note = RNA
ggtccggcagatgagaaggc

SEQ ID NO: 129 - DNA, 20 bp, synthetic construct
  source 1..20: mol_type = other DNA
  modified_base 1: mod_base = OTHER; note = 2'-O-methoxyethyl 5-methylcytidine
  modified_base 2: mod_base = OTHER; note = 2'-O-methoxyethyl 5-methylcytidine
  modified_base 3: mod_base = OTHER; note = 2'-O-methoxyethyl guanosine
  modified_base 4: mod_base = OTHER; note = 2'-O-methoxyethyl guanosine
  modified_base 5: mod_base = OTHER; note = 2'-O-methoxyethyl 5-methylcytidine
  modified_base 16: mod_base = OTHER; note = 2'-O-methoxyethyl guanosine
  modified_base 17: mod_base = OTHER; note = 2'-O-methoxyethyl 5-methylcytidine
  modified_base 18: mod_base = OTHER; note = 2'-O-methoxyethyl adenosine
  modified_base 19: mod_base = OTHER; note = 2'-O-methoxyethyl 5-methylcytidine
  modified_base 20: mod_base = OTHER; note = 2'-O-methoxyethyl adenosine
  misc_feature 1..5: note = RNA
  misc_feature 6..15: note = DNA
  misc_feature 16..20: note = RNA
ccggcagatgagaaggcaca

SEQ ID NO: 130 - DNA, 20 bp, synthetic construct
  source 1..20: mol_type = other DNA
  modified_base 1: mod_base = OTHER; note = 2'-O-methoxyethyl guanosine
  modified_base 2: mod_base = OTHER; note = 2'-O-methoxyethyl guanosine
  modified_base 3: mod_base = OTHER; note = 2'-O-methoxyethyl 5-methylcytidine
  modified_base 4: mod_base = OTHER; note = 2'-O-methoxyethyl adenosine
  modified_base 5: mod_base = OTHER; note = 2'-O-methoxyethyl 5-methylcytidine
  modified_base 9: mod_base = OTHER; note = 2'-deoxy 5-methylcytidine
  modified_base 16: mod_base = OTHER; note = 2'-O-methoxyethyl thymidine
  modified_base 17: mod_base = OTHER; note = 2'-O-methoxyethyl 5-methylcytidine
  modified_base 18: mod_base = OTHER; note = 2'-O-methoxyethyl 5-methylcytidine
  modified_base 19: mod_base = OTHER; note = 2'-O-methoxyethyl guanosine
  modified_base 20: mod_base = OTHER; note = 2'-O-methoxyethyl 5-methylcytidine
  misc_feature 1..5: note = RNA
  misc_feature 6..15: note = DNA
  misc_feature 16..20: note = RNA
ggcacagacggggagtccgc

SEQ ID NO: 131 - DNA, 20 bp, synthetic construct
  source 1..20: mol_type = other DNA
  modified_base 1: mod_base = OTHER; note = 2'-O-methoxyethyl guanosine
  modified_base 2: mod_base = OTHER; note = 2'-O-methoxyethyl thymidine
  modified_base 3: mod_base = OTHER; note = 2'-O-methoxyethyl 5-methylcytidine
  modified_base 4: mod_base = OTHER; note = 2'-O-methoxyethyl 5-methylcytidine
  modified_base 5: mod_base = OTHER; note = 2'-O-methoxyethyl guanosine
  modified_base 6: mod_base = OTHER; note = 2'-deoxy 5-methylcytidine
  modified_base 16: mod_base = OTHER; note = 2'-O-methoxyethyl guanosine
  modified_base 17: mod_base = OTHER; note = 2'-O-methoxyethyl guanosine
  modified_base 18: mod_base = OTHER; note = 2'-O-methoxyethyl thymidine
  modified_base 19: mod_base = OTHER; note = 2'-O-methoxyethyl guanosine
  modified_base 20: mod_base = OTHER; note = 2'-O-methoxyethyl 5-methylcytidine
  misc_feature 1..5: note = RNA
  misc_feature 6..15: note = DNA
  misc_feature 16..20: note = RNA
gtccgcgtaaagagaggtgc

SEQ ID NO: 132 - DNA, 20 bp, synthetic construct
  source 1..20: mol_type = other DNA
  modified_base 1: mod_base = OTHER; note = 2'-O-methoxyethyl guanosine
  modified_base 2: mod_base = OTHER; note = 2'-O-methoxyethyl 5-methylcytidine
  modified_base 3: mod_base = OTHER; note = 2'-O-methoxyethyl adenosine
  modified_base 4: mod_base = OTHER; note = 2'-O-methoxyethyl guanosine
  modified_base 5: mod_base = OTHER; note = 2'-O-methoxyethyl adenosine
  modified_base 8: mod_base = OTHER; note = 2'-F-ANA with thymine base
  modified_base 13: mod_base = OTHER; note = 2'-deoxy 5-methylcytidine
  modified_base 16: mod_base = OTHER; note = 2'-O-methoxyethyl adenosine
  modified_base 17: mod_base = OTHER; note = 2'-O-methoxyethyl guanosine
  modified_base 18: mod_base = OTHER; note = 2'-O-methoxyethyl uridine
  modified_base 19: mod_base = OTHER; note = 2'-O-methoxyethyl guanosine
  modified_base 20: mod_base = OTHER; note = 2'-O-methoxyethyl 5-methylcytidine
  misc_feature 1..5: note = RNA
  misc_feature 6..7: note = DNA
  misc_feature 8: note = RNA
  misc_feature 9..15: note = DNA
  misc_feature 16..20: note = RNA
gcagaggtgaagcgaagtgc

SEQ ID NO: 133 - DNA, 20 bp, synthetic construct
  source 1..20: mol_type = other DNA
  modified_base 1: mod_base = OTHER; note = 2'-O-methoxyethyl guanosine
  modified_base 2: mod_base = OTHER; note = 2'-O-methoxyethyl 5-methylcytidine
  modified_base 3: mod_base = OTHER; note = 2'-O-methoxyethyl adenosine
  modified_base 4: mod_base = OTHER; note = 2'-O-methoxyethyl guanosine
  modified_base 5: mod_base = OTHER; note = 2'-O-methoxyethyl adenosine
  modified_base 10: mod_base = OTHER; note = 2'-F-ANA with adenine base
  modified_base 13: mod_base = OTHER; note = 2'-deoxy 5-methylcytidine
  modified_base 16: mod_base = OTHER; note = 2'-O-methoxyethyl adenosine
  modified_base 17: mod_base = OTHER; note = 2'-O-methoxyethyl guanosine
  modified_base 18: mod_base = OTHER; note = 2'-O-methoxyethyl uridine
  modified_base 19: mod_base = OTHER; note = 2'-O-methoxyethyl guanosine
  modified_base 20: mod_base = OTHER; note = 2'-O-methoxyethyl 5-methylcytidine
  misc_feature 1..5: note = RNA
  misc_feature 6..9: note = DNA
  misc_feature 10: note = RNA
  misc_feature 11..15: note = DNA
  misc_feature 16..20: note = RNA
gcagaggtgaagcgaagtgc

SEQ ID NO: 134 - DNA, 20 bp, synthetic construct
  source 1..20: mol_type = other DNA
  modified_base 1: mod_base = OTHER; note = 2'-O-methoxyethyl guanosine
  modified_base 2: mod_base = OTHER; note = 2'-O-methoxyethyl 5-methylcytidine
  modified_base 3: mod_base = OTHER; note = 2'-O-methoxyethyl adenosine
  modified_base 4: mod_base = OTHER; note = 2'-O-methoxyethyl guanosine
  modified_base 5: mod_base = OTHER; note = 2'-O-methoxyethyl adenosine
  modified_base 11: mod_base = OTHER; note = 2'-F-ANA with adenine base
  modified_base 13: mod_base = OTHER; note = 2'-deoxy 5-methylcytidine
  modified_base 16: mod_base = OTHER; note = 2'-O-methoxyethyl adenosine
  modified_base 17: mod_base = OTHER; note = 2'-O-methoxyethyl guanosine
  modified_base 18: mod_base = OTHER; note = 2'-O-methoxyethyl uridine
  modified_base 19: mod_base = OTHER; note = 2'-O-methoxyethyl guanosine
  modified_base 20: mod_base = OTHER; note = 2'-O-methoxyethyl 5-methylcytidine
  misc_feature 1..5: note = RNA
  misc_feature 6..10: note = DNA
  misc_feature 11: note = RNA
  misc_feature 12..15: note = DNA
  misc_feature 16..20: note = RNA
gcagaggtgaagcgaagtgc

SEQ ID NO: 135 - DNA, 20 bp, synthetic construct
  source 1..20: mol_type = other DNA
  modified_base 1: mod_base = OTHER; note = 2'-O-methoxyethyl guanosine
  modified_base 2: mod_base = OTHER; note = 2'-O-methoxyethyl 5-methylcytidine
  modified_base 3: mod_base = OTHER; note = 2'-O-methoxyethyl adenosine
  modified_base 4: mod_base = OTHER; note = 2'-O-methoxyethyl guanosine
  modified_base 5: mod_base = OTHER; note = 2'-O-methoxyethyl adenosine
  modified_base 13: mod_base = OTHER; note = 2'-deoxy 5-methylcytidine
  modified_base 14: mod_base = OTHER; note = 2'-F-ANA with guanine base
  modified_base 16: mod_base = OTHER; note = 2'-O-methoxyethyl adenosine
  modified_base 17: mod_base = OTHER; note = 2'-O-methoxyethyl guanosine
  modified_base 18: mod_base = OTHER; note = 2'-O-methoxyethyl uridine
  modified_base 19: mod_base = OTHER; note = 2'-O-methoxyethyl guanosine
  modified_base 20: mod_base = OTHER; note = 2'-O-methoxyethyl 5-methylcytidine
  misc_feature 1..5: note = RNA
  misc_feature 6..13: note = DNA
  misc_feature 14: note = RNA
  misc_feature 15: note = DNA
  misc_feature 16..20: note = RNA
gcagaggtgaagcgaagtgc

SEQ ID NO: 136 - DNA, 20 bp, synthetic construct
  source 1..20: mol_type = other DNA
  modified_base 1: mod_base = OTHER; note = 2'-O-methoxyethyl guanosine
  modified_base 2: mod_base = OTHER; note = 2'-O-methoxyethyl 5-methylcytidine
  modified_base 3: mod_base = OTHER; note = 2'-O-methoxyethyl adenosine
  modified_base 4: mod_base = OTHER; note = 2'-O-methoxyethyl guanosine
  modified_base 5: mod_base = OTHER; note = 2'-O-methoxyethyl adenosine
  modified_base 10: mod_base = OTHER; note = 2'-F-ANA with adenine base
  modified_base 13: mod_base = OTHER; note = 2'-deoxy 5-methylcytidine
  modified_base 14: mod_base = OTHER; note = 2'-F-ANA with guanine base
  modified_base 16: mod_base = OTHER; note = 2'-O-methoxyethyl adenosine
  modified_base 17: mod_base = OTHER; note = 2'-O-methoxyethyl guanosine
  modified_base 18: mod_base = OTHER; note = 2'-O-methoxyethyl uridine
  modified_base 19: mod_base = OTHER; note = 2'-O-methoxyethyl guanosine
  modified_base 20: mod_base = OTHER; note = 2'-O-methoxyethyl 5-methylcytidine
  misc_feature 1..5: note = RNA
  misc_feature 6..9: note = DNA
  misc_feature 10: note = RNA
  misc_feature 11..13: note = DNA
  misc_feature 14: note = RNA
  misc_feature 15: note = DNA
  misc_feature 16..20: note = RNA
gcagaggtgaagcgaagtgc

SEQ ID NO: 137 - DNA, 20 bp, synthetic construct
  source 1..20: mol_type = other DNA
  modified_base 1: mod_base = OTHER; note = 2'-O-methoxyethyl guanosine
  modified_base 2: mod_base = OTHER; note = 2'-O-methoxyethyl 5-methylcytidine
  modified_base 3: mod_base = OTHER; note = 2'-O-methoxyethyl adenosine
  modified_base 4: mod_base = OTHER; note = 2'-O-methoxyethyl guanosine
  modified_base 5: mod_base = OTHER; note = 2'-O-methoxyethyl adenosine
  modified_base 10: mod_base = OTHER; note = Glycol nucleic acid with adenine base
  modified_base 13: mod_base = OTHER; note = 2'-deoxy 5-methylcytidine
  modified_base 16: mod_base = OTHER; note = 2'-O-methoxyethyl adenosine
  modified_base 17: mod_base = OTHER; note = 2'-O-methoxyethyl guanosine
  modified_base 18: mod_base = OTHER; note = 2'-O-methoxyethyl thymidine
  modified_base 19: mod_base = OTHER; note = 2'-O-methoxyethyl guanosine
  modified_base 20: mod_base = OTHER; note = 2'-O-methoxyethyl 5-methylcytidine
  misc_feature 1..5: note = RNA
  misc_feature 6..9: note = DNA
  misc_feature 10: note = RNA
  misc_feature 11..15: note = DNA
  misc_feature 16..20: note = RNA
gcagaggtgaagcgaagtgc

SEQ ID NO: 138 - DNA, 20 bp, synthetic construct
  source 1..20: mol_type = other DNA
  modified_base 1: mod_base = OTHER; note = 2'-O-methoxyethyl guanosine
  modified_base 2: mod_base = OTHER; note = 2'-O-methoxyethyl 5-methylcytidine
  modified_base 3: mod_base = OTHER; note = 2'-O-methoxyethyl adenosine
  modified_base 4: mod_base = OTHER; note = 2'-O-methoxyethyl guanosine
  modified_base 5: mod_base = OTHER; note = 2'-O-methoxyethyl adenosine
  modified_base 11: mod_base = OTHER; note = Glycol nucleic acid with adenine base
  modified_base 13: mod_base = OTHER; note = 2'-deoxy 5-methylcytidine
  modified_base 16: mod_base = OTHER; note = 2'-O-methoxyethyl adenosine
  modified_base 17: mod_base = OTHER; note = 2'-O-methoxyethyl guanosine
  modified_base 18: mod_base = OTHER; note = 2'-O-methoxyethyl thymidine
  modified_base 19: mod_base = OTHER; note = 2'-O-methoxyethyl guanosine
  modified_base 20: mod_base = OTHER; note = 2'-O-methoxyethyl 5-methylcytidine
  misc_feature 1..5: note = RNA
  misc_feature 6..10: note = DNA
  misc_feature 11: note = RNA
  misc_feature 12..15: note = DNA
  misc_feature 16..20: note = RNA
gcagaggtgaagcgaagtgc

SEQ ID NO: 139 - DNA, 20 bp, synthetic construct
  source 1..20: mol_type = other DNA
  modified_base 1: mod_base = OTHER; note = 2'-O-methoxyethyl guanosine
  modified_base 2: mod_base = OTHER; note = 2'-O-methoxyethyl 5-methylcytidine
  modified_base 3: mod_base = OTHER; note = 2'-O-methoxyethyl adenosine
  modified_base 4: mod_base = OTHER; note = 2'-O-methoxyethyl guanosine
  modified_base 5: mod_base = OTHER; note = 2'-O-methoxyethyl adenosine
  modified_base 6: mod_base = OTHER; note = 2'-O-methyl guanosine
  modified_base 11: mod_base = OTHER; note = 2'-O-methyl adenosine
  modified_base 13: mod_base = OTHER; note = 2'-deoxy 5-methylcytidine
  modified_base 16: mod_base = OTHER; note = 2'-O-methoxyethyl adenosine
  modified_base 17: mod_base = OTHER; note = 2'-O-methoxyethyl 5-methylcytidine
  modified_base 18: mod_base = OTHER; note = 2'-O-methoxyethyl thymidine
  modified_base 19: mod_base = OTHER; note = 2'-O-methoxyethyl guanosine
  modified_base 20: mod_base = OTHER; note = 2'-O-methoxyethyl 5-methylcytidine
  misc_feature 1..6: note = RNA
  misc_feature 7..10: note = DNA
  misc_feature 11: note = RNA
  misc_feature 12..15: note = DNA
  misc_feature 16..20: note = RNA
gcagaggtgaagcgaactgc

SEQ ID NO: 140 - DNA, 20 bp, synthetic construct
  source 1..20: mol_type = other DNA
  modified_base 1: mod_base = OTHER; note = 2'-O-methoxyethyl guanosine
  modified_base 2: mod_base = OTHER; note = 2'-O-methoxyethyl 5-methylcytidine
  modified_base 3: mod_base = OTHER; note = 2'-O-methoxyethyl adenosine
  modified_base 4: mod_base = OTHER; note = 2'-O-methoxyethyl guanosine
  modified_base 5: mod_base = OTHER; note = 2'-O-methoxyethyl adenosine
  modified_base 6: mod_base = OTHER; note = 2'-O-methyl guanosine
  modified_base 11: mod_base = OTHER; note = 2'-O-methyl adenosine
  modified_base 13: mod_base = OTHER; note = 2'-deoxy 5-methylcytidine
  modified_base 16: mod_base = OTHER; note = 2'-O-methoxyethyl adenosine
  modified_base 17: mod_base = OTHER; note = 2'-O-methoxyethyl guanosine
  modified_base 18: mod_base = OTHER; note = 2'-O-methoxyethyl adenosine
  modified_base 19: mod_base = OTHER; note = 2'-O-methoxyethyl guanosine
  modified_base 20: mod_base = OTHER; note = 2'-O-methoxyethyl 5-methylcytidine
  misc_feature 1..6: note = RNA
  misc_feature 7..10: note = DNA
  misc_feature 11: note = RNA
  misc_feature 12..15: note = DNA
  misc_feature 16..20: note = RNA
gcagaggtgaagcgaagagc

SEQ ID NO: 141 - DNA, 20 bp, synthetic construct
  source 1..20: mol_type = other DNA
  modified_base 1: mod_base = OTHER; note = 2'-O-methoxyethyl guanosine
  modified_base 2: mod_base = OTHER; note = 2'-O-methoxyethyl 5-methylcytidine
  modified_base 3: mod_base = OTHER; note = 2'-O-methoxyethyl adenosine
  modified_base 4: mod_base = OTHER; note = 2'-O-methoxyethyl guanosine
  modified_base 5: mod_base = OTHER; note = 2'-O-methoxyethyl adenosine
  modified_base 6: mod_base = OTHER; note = 2'-O-methyl guanosine
  modified_base 11: mod_base = OTHER; note = 2'-O-methyl adenosine
  modified_base 13: mod_base = OTHER; note = 2'-deoxy 5-methylcytidine
  modified_base 16: mod_base = OTHER; note = 2'-O-methoxyethyl adenosine
  modified_base 17: mod_base = OTHER; note = 2'-O-methoxyethyl guanosine
  modified_base 18: mod_base = OTHER; note = 2'-O-methoxyethyl thymidine
  modified_base 19: mod_base = OTHER; note = 2'-O-methoxyethyl 5-methylcytidine
  modified_base 20: mod_base = OTHER; note = 2'-O-methoxyethyl 5-methylcytidine
  misc_feature 1..6: note = RNA
  misc_feature 7..10: note = DNA
  misc_feature 11: note = RNA
  misc_feature 12..15: note = DNA
  misc_feature 16..20: note = RNA
gcagaggtgaagcgaagtcc

SEQ ID NO: 142 - DNA, 20 bp, synthetic construct
  source 1..20: mol_type = other DNA
  modified_base 1: mod_base = OTHER; note = 2'-O-methoxyethyl guanosine
  modified_base 2: mod_base = OTHER; note = 2'-O-methoxyethyl 5-methylcytidine
  modified_base 3: mod_base = OTHER; note = 2'-O-methoxyethyl adenosine
  modified_base 4: mod_base = OTHER; note = 2'-O-methoxyethyl guanosine
  modified_base 5: mod_base = OTHER; note = 2'-O-methoxyethyl adenosine
  modified_base 6: mod_base = OTHER; note = 2'-O-methyl guanosine
  modified_base 11: mod_base = OTHER; note = 2'-O-methyl adenosine
  modified_base 13: mod_base = OTHER; note = 2'-deoxy 5-methylcytidine
  modified_base 16: mod_base = OTHER; note = 2'-O-methoxyethyl adenosine
  modified_base 17: mod_base = OTHER; note = 2'-O-methoxyethyl guanosine
  modified_base 18: mod_base = OTHER; note = 2'-O-methoxyethyl thymidine
  modified_base 19: mod_base = OTHER; note = 2'-O-methoxyethyl guanosine
  modified_base 20: mod_base = OTHER; note = 2'-O-methoxyethyl guanosine
  misc_feature 1..6: note = RNA
  misc_feature 7..10: note = DNA
  misc_feature 11: note = RNA
  misc_feature 12..15: note = DNA
  misc_feature 16..20: note = RNA
gcagaggtgaagcgaagtgg

SEQ ID NO: 143 - DNA, 20 bp, synthetic construct
  source 1..20: mol_type = other DNA
  modified_base 1: mod_base = OTHER; note = 2'-O-methoxyethyl guanosine
  modified_base 2: mod_base = OTHER; note = 2'-O-methoxyethyl 5-methylcytidine
  modified_base 3: mod_base = OTHER; note = 2'-O-methoxyethyl adenosine
  modified_base 4: mod_base = OTHER; note = 2'-O-methoxyethyl guanosine
  modified_base 5: mod_base = OTHER; note = 2'-O-methoxyethyl adenosine
  modified_base 13: mod_base = OTHER; note = Glycol nucleic acid with 5-methylcytidine base
  modified_base 16: mod_base = OTHER; note = 2'-O-methoxyethyl adenosine
  modified_base 17: mod_base = OTHER; note = 2'-O-methoxyethyl guanosine
  modified_base 18: mod_base = OTHER; note = 2'-O-methoxyethyl thymidine
  modified_base 19: mod_base = OTHER; note = 2'-O-methoxyethyl guanosine
  modified_base 20: mod_base = OTHER; note = 2'-O-methoxyethyl 5-methylcytidine
  misc_feature 1..5: note = RNA
  misc_feature 6..12: note = DNA
  misc_feature 13: note = RNA
  misc_feature 14..15: note = DNA
  misc_feature 16..20: note = RNA
gcagaggtgaagcgaagtgc

SEQ ID NO: 144 - DNA, 20 bp, synthetic construct
  source 1..20: mol_type = other DNA
  modified_base 1: mod_base = OTHER; note = 2'-O-methoxyethyl guanosine
  modified_base 2: mod_base = OTHER; note = Glycol nucleic acid with 5-methylcytidine base
  modified_base 3: mod_base = OTHER; note = 2'-O-methoxyethyl adenosine
  modified_base 4: mod_base = OTHER; note = 2'-O-methoxyethyl guanosine
  modified_base 5: mod_base = OTHER; note = 2'-O-methoxyethyl adenosine
  modified_base 13: mod_base = OTHER; note = 2'-deoxy 5-methylcytidine
  modified_base 16: mod_base = OTHER; note = 2'-O-methoxyethyl adenosine
  modified_base 17: mod_base = OTHER; note = 2'-O-methoxyethyl guanosine
  modified_base 18: mod_base = OTHER; note = 2'-O-methoxyethyl thymidine
  modified_base 19: mod_base = OTHER; note = 2'-O-methoxyethyl guanosine
  modified_base 20: mod_base = OTHER; note = 2'-O-methoxyethyl 5-methylcytidine
  misc_feature 1..5: note = RNA
  misc_feature 6..15: note = DNA
  misc_feature 16..20: note = RNA
gcagaggtgaagcgaagtgc

SEQ ID NO: 145 - DNA, 20 bp, synthetic construct
  source 1..20: mol_type = other DNA
  modified_base 1: mod_base = OTHER; note = 2'-O-methoxyethyl guanosine
  modified_base 2: mod_base = OTHER; note = Glycol nucleic acid with 5-methylcytidine base
  modified_base 3: mod_base = OTHER; note = 2'-O-methoxyethyl adenosine
  modified_base 4: mod_base = OTHER; note = 2'-O-methoxyethyl guanosine
  modified_base 5: mod_base = OTHER; note = 2'-O-methoxyethyl adenosine
  modified_base 13: mod_base = OTHER; note = Glycol nucleic acid with 5-methylcytidine base
  modified_base 16: mod_base = OTHER; note = 2'-O-methoxyethyl adenosine
  modified_base 17: mod_base = OTHER; note = 2'-O-methoxyethyl guanosine
  modified_base 18: mod_base = OTHER; note = 2'-O-methoxyethyl thymidine
  modified_base 19: mod_base = OTHER; note = 2'-O-methoxyethyl guanosine
  modified_base 20: mod_base = OTHER; note = 2'-O-methoxyethyl 5-methylcytidine
  misc_feature 1..5: note = RNA
  misc_feature 6..12: note = DNA
  misc_feature 13: note = RNA
  misc_feature 14..15: note = DNA
  misc_feature 16..20: note = RNA
gcagaggtgaagcgaagtgc

SEQ ID NO: 146 - DNA, 20 bp, synthetic construct
  source 1..20: mol_type = other DNA
  modified_base 1: mod_base = OTHER; note = 2'-O-methoxyethyl guanosine
  modified_base 2: mod_base = OTHER; note = 2'-O-methoxyethyl 5-methylcytidine
  modified_base 3: mod_base = OTHER; note = 2'-O-methoxyethyl adenosine
  modified_base 4: mod_base = OTHER; note = 2'-O-methoxyethyl guanosine
  modified_base 5: mod_base = OTHER; note = 2'-O-methoxyethyl adenosine
  modified_base 6: mod_base = OTHER; note = 2'-O-methyl guanosine
  modified_base 11: mod_base = OTHER; note = 2'-O-methyl adenosine
  modified_base 13: mod_base = OTHER; note = Glycol nucleic acid with 5-methylcytidine base
  modified_base 16: mod_base = OTHER; note = 2'-O-methoxyethyl adenosine
  modified_base 17: mod_base = OTHER; note = 2'-O-methoxyethyl guanosine
  modified_base 18: mod_base = OTHER; note = 2'-O-methoxyethyl thymidine
  modified_base 19: mod_base = OTHER; note = 2'-O-methoxyethyl guanosine
  modified_base 20: mod_base = OTHER; note = 2'-O-methoxyethyl 5-methylcytidine
  misc_feature 1..6: note = RNA
  misc_feature 7..10: note = DNA
  misc_feature 11: note = RNA
  misc_feature 12: note = DNA
  misc_feature 13: note = RNA
  misc_feature 14..15: note = DNA
  misc_feature 16..20: note = RNA
gcagaggtgaagcgaagtgc

SEQ ID NO: 147 - DNA, 20 bp, synthetic construct
  source 1..20: mol_type = other DNA
  modified_base 1: mod_base = OTHER; note = 2'-O-methoxyethyl guanosine
  modified_base 2: mod_base = OTHER; note = Glycol nucleic acid with 5-methylcytidine base
  modified_base 3: mod_base = OTHER; note = 2'-O-methoxyethyl adenosine
  modified_base 4: mod_base = OTHER; note = 2'-O-methoxyethyl guanosine
  modified_base 5: mod_base = OTHER; note = 2'-O-methoxyethyl adenosine
  modified_base 6: mod_base = OTHER; note = 2'-O-methyl guanosine
  modified_base 11: mod_base = OTHER; note = 2'-O-methyl adenosine
  modified_base 13: mod_base = OTHER; note = 2'-deoxy 5-methylcytidine
  modified_base 16: mod_base = OTHER; note = 2'-O-methoxyethyl adenosine
  modified_base 17: mod_base = OTHER; note = 2'-O-methoxyethyl guanosine
  modified_base 18: mod_base = OTHER; note = 2'-O-methoxyethyl thymidine
  modified_base 19: mod_base = OTHER; note = 2'-O-methoxyethyl guanosine
  modified_base 20: mod_base = OTHER; note = 2'-O-methoxyethyl 5-methylcytidine
  misc_feature 1..6: note = RNA
  misc_feature 7..10: note = DNA
  misc_feature 11: note = RNA
  misc_feature 12..15: note = DNA
  misc_feature 16..20: note = RNA
gcagaggtgaagcgaagtgc

SEQ ID NO: 148 - DNA, 20 bp, synthetic construct
  source 1..20: mol_type = other DNA
  modified_base 1: mod_base = OTHER; note = 2'-O-methoxyethyl guanosine
  modified_base 2: mod_base = OTHER; note = Glycol nucleic acid with 5-methylcytidine base
  modified_base 3: mod_base = OTHER; note = 2'-O-methoxyethyl adenosine
  modified_base 4: mod_base = OTHER; note = 2'-O-methoxyethyl guanosine
  modified_base 5: mod_base = OTHER; note = 2'-O-methoxyethyl adenosine
  modified_base 6: mod_base = OTHER; note = 2'-O-methyl guanosine
  modified_base 11: mod_base = OTHER; note = 2'-O-methyl adenosine
  modified_base 13: mod_base = OTHER; note = Glycol nucleic acid with 5-methylcytidine base
  modified_base 16: mod_base = OTHER; note = 2'-O-methoxyethyl adenosine
  modified_base 17: mod_base = OTHER; note = 2'-O-methoxyethyl guanosine
  modified_base 18: mod_base = OTHER; note = 2'-O-methoxyethyl thymidine
  modified_base 19: mod_base = OTHER; note = 2'-O-methoxyethyl guanosine
  modified_base 20: mod_base = OTHER; note = 2'-O-methoxyethyl 5-methylcytidine
  misc_feature 1..6: note = RNA
  misc_feature 7..10: note = DNA
  misc_feature 11: note = RNA
  misc_feature 12: note = DNA
  misc_feature 13: note = RNA
  misc_feature 14..15: note = DNA
  misc_feature 16..20: note = RNA
gcagaggtgaagcgaagtgc

SEQ ID NO: 149 - DNA, 20 bp, synthetic construct
  source 1..20: mol_type = other DNA
  modified_base 1: mod_base = OTHER; note = 2'-O-methoxyethyl guanosine
  modified_base 2: mod_base = OTHER; note = 2'-O-methoxyethyl 5-methylcytidine
  modified_base 3: mod_base = OTHER; note = 2'-O-methoxyethyl adenosine
  modified_base 4: mod_base = OTHER; note = 2'-O-methoxyethyl guanosine
  modified_base 5: mod_base = OTHER; note = 2'-O-methoxyethyl adenosine
  modified_base 6: mod_base = OTHER; note = 2'-O-methyl guanosine
  modified_base 11: mod_base = OTHER; note = 2'-O-methyl adenosine
  modified_base 13: mod_base = OTHER; note = Glycol nucleic acid with 5-methylcytidine base
  modified_base 16: mod_base = OTHER; note = Locked nucleic acid with adenine base
  modified_base 17: mod_base = OTHER; note = 2'-O-methoxyethyl guanosine
  modified_base 18: mod_base = OTHER; note = Locked nucleic acid with thymine base
  modified_base 19: mod_base = OTHER; note = 2'-O-methoxyethyl guanosine
  modified_base 20: mod_base = OTHER; note = Locked nucleic acid with 5-methylcytidine base
  misc_feature 1..6: note = RNA
  misc_feature 7..10: note = DNA
  misc_feature 11: note = RNA
  misc_feature 12: note = DNA
  misc_feature 13: note = RNA
  misc_feature 14..15: note = DNA
  misc_feature 16..20: note = RNA
gcagaggtgaagcgaagtgc

SEQ ID NO: 150 - DNA, 20 bp, synthetic construct
  source 1..20: mol_type = other DNA
  modified_base 1: mod_base = OTHER; note = 2'-O-methoxyethyl guanosine
  modified_base 2: mod_base = OTHER; note = Glycol nucleic acid with 5-methylcytidine base
  modified_base 3: mod_base = OTHER; note = 2'-O-methoxyethyl adenosine
  modified_base 4: mod_base = OTHER; note = 2'-O-methoxyethyl guanosine
  modified_base 5: mod_base = OTHER; note = 2'-O-methoxyethyl adenosine
  modified_base 6: mod_base = OTHER; note = 2'-O-methyl guanosine
  modified_base 11: mod_base = OTHER; note = 2'-O-methyl adenosine
  modified_base 13: mod_base = OTHER; note = Glycol nucleic acid with 5-methylcytidine base
  modified_base 16: mod_base = OTHER; note = Locked nucleic acid with adenine base
  modified_base 17: mod_base = OTHER; note = 2'-O-methoxyethyl guanosine
  modified_base 18: mod_base = OTHER; note = Locked nucleic acid with thymine base
  modified_base 19: mod_base = OTHER; note = 2'-O-methoxyethyl guanosine
  modified_base 20: mod_base = OTHER; note = Locked nucleic acid with 5-methylcytidine base
  misc_feature 1..6: note = RNA
  misc_feature 7..10: note = DNA
  misc_feature 11: note = RNA
  misc_feature 12: note = DNA
  misc_feature 13: note = RNA
  misc_feature 14..15: note = DNA
  misc_feature 16..20: note = RNA
gcagaggtgaagcgaagtgc

SEQ ID NO: 151 - DNA, 20 bp, synthetic construct
  source 1..20: mol_type = other DNA
  modified_base 1: mod_base = OTHER; note = 2'-O-methoxyethyl guanosine
  modified_base 2: mod_base = OTHER; note = Glycol nucleic acid with 5-methylcytidine base
  modified_base 3: mod_base = OTHER; note = 2'-O-methoxyethyl adenosine
  modified_base 4: mod_base = OTHER; note = 2'-O-methoxyethyl guanosine
  modified_base 5: mod_base = OTHER; note = 2'-O-methoxyethyl adenosine
  modified_base 10: mod_base = OTHER; note = 2'-O-methyl adenosine
  modified_base 13: mod_base = OTHER; note = Glycol nucleic acid with 5-methylcytidine base
  modified_base 15: mod_base = OTHER; note = 2'-O-methyl adenosine
  modified_base 16: mod_base = OTHER; note = Locked nucleic acid with adenine base
  modified_base 17: mod_base = OTHER; note = 2'-O-methoxyethyl guanosine
  modified_base 18: mod_base = OTHER; note = Locked nucleic acid with thymine base
  modified_base 19: mod_base = OTHER; note = 2'-O-methoxyethyl guanosine
  modified_base 20: mod_base = OTHER; note = Locked nucleic acid with 5-methylcytidine base
  misc_feature 1..5: note = RNA
  misc_feature 6..9: note = DNA
  misc_feature 10: note = RNA
  misc_feature 11..12: note = DNA
  misc_feature 13: note = RNA
  misc_feature 14: note = DNA
  misc_feature 15..20: note = RNA
gcagaggtgaagcgaagtgc

SEQ ID NO: 152 - DNA, 20 bp, synthetic construct
  source 1..20: mol_type = other DNA
  modified_base 1: mod_base = OTHER; note = 2'-O-methoxyethyl guanosine
  modified_base 2: mod_base = OTHER; note = Glycol nucleic acid with 5-methylcytidine base
  modified_base 3: mod_base = OTHER; note = Locked nucleic acid with adenine base
  modified_base 4: mod_base = OTHER; note = 2'-O-methoxyethyl guanosine
  modified_base 5: mod_base = OTHER; note = 2'-O-methoxyethyl adenosine
  modified_base 6: mod_base = OTHER; note = 2'-O-methyl guanosine
  modified_base 11: mod_base = OTHER; note = 2'-O-methyl adenosine
  modified_base 13: mod_base = OTHER; note = Glycol nucleic acid with 5-methylcytidine base
  modified_base 16: mod_base = OTHER; note = Locked nucleic acid with adenine base
  modified_base 17: mod_base = OTHER; note = 2'-O-methoxyethyl guanosine
  modified_base 18: mod_base = OTHER; note = Locked nucleic acid with thymine base
  modified_base 19: mod_base = OTHER; note = 2'-O-methoxyethyl guanosine
  modified_base 20: mod_base = OTHER; note = Locked nucleic acid with 5-methylcytidine base
  misc_feature 1..6: note = RNA
  misc_feature 7..10: note = DNA
  misc_feature 11: note = RNA
  misc_feature 12: note = DNA
  misc_feature 13: note = RNA
  misc_feature 14..15: note = DNA
  misc_feature 16..20: note = RNA
gcagaggtgaagcgaagtgc

SEQ ID NO: 153 - DNA, 22 bp, synthetic construct
  source 1..22: mol_type = other DNA
  modified_base 4: mod_base = OTHER; note = 2'-deoxy cytidine
  modified_base 11: mod_base = OTHER; note = Glycol nucleic acid with 5-methylcytidine base
  modified_base 15: mod_base = OTHER; note = Glycol nucleic acid with 5-methylcytidine base
  misc_feature 1..10: note = DNA
  misc_feature 11: note = RNA
  misc_feature 12..14: note = DNA
  misc_feature 15: note = RNA
  misc_feature 16..22: note = DNA
tgactgtgaacgttcgagatga

SEQ ID NO: 154 - DNA, 20 bp, synthetic construct
  source 1..20: mol_type = other DNA
  modified_base 1: mod_base = OTHER; note = 2'-O-methoxyethyl guanosine
  modified_base 2: mod_base = OTHER; note = 2'-O-methoxyethyl 5-methylcytidine
  modified_base 3: mod_base = OTHER; note = 2'-O-methoxyethyl adenosine
  modified_base 4: mod_base = OTHER; note = 2'-O-methoxyethyl guanosine
  modified_base 5: mod_base = OTHER; note = 2'-O-methoxyethyl adenosine
  modified_base 11: mod_base = OTHER; note = 2'-O-methoxyethyl adenosine
  modified_base 13: mod_base = OTHER; note = 2'-deoxy 5-methylcytidine
  modified_base 16: mod_base = OTHER; note = 2'-O-methoxyethyl adenosine
  modified_base 17: mod_base = OTHER; note = 2'-O-methoxyethyl guanosine
  modified_base 18: mod_base = OTHER; note = 2'-O-methoxyethyl thymidine
  modified_base 19: mod_base = OTHER; note = 2'-O-methoxyethyl guanosine
  modified_base 20: mod_base = OTHER; note = 2'-O-methoxyethyl 5-methylcytidine
  misc_feature 1..5: note = RNA
  misc_feature 6..10: note = DNA
  misc_feature 11: note = RNA
  misc_feature 12..15: note = DNA
  misc_feature 16..20: note = RNA
gcagaggtgaagcgaagtgc

SEQ ID NO: 155 - DNA, 20 bp, synthetic construct
  source 1..20: mol_type = other DNA
  modified_base 1: mod_base = OTHER; note = 2'-O-methoxyethyl guanosine
  modified_base 2: mod_base = OTHER; note = 2'-O-methoxyethyl 5-methylcytidine
  modified_base 3: mod_base = OTHER; note = 2'-O-methoxyethyl adenosine
  modified_base 4: mod_base = OTHER; note = 2'-O-methoxyethyl guanosine
  modified_base 5: mod_base = OTHER; note = 2'-O-methoxyethyl adenosine
  modified_base 10: mod_base = OTHER; note = 2'-O-methoxyethyl adenosine
  modified_base 13: mod_base = OTHER; note = 2'-deoxy 5-methylcytidine
  modified_base 16: mod_base = OTHER; note = 2'-O-methoxyethyl adenosine
  modified_base 17: mod_base = OTHER; note = 2'-O-methoxyethyl guanosine
  modified_base 18: mod_base = OTHER; note = 2'-O-methoxyethyl thymidine
  modified_base 19: mod_base = OTHER; note = 2'-O-methoxyethyl guanosine
  modified_base 20: mod_base = OTHER; note = 2'-O-methoxyethyl 5-methylcytidine
  misc_feature 1..5: note = RNA
  misc_feature 6..9: note = DNA
  misc_feature 10: note = RNA
  misc_feature 11..15: note = DNA
  misc_feature 16..20: note = RNA
gcagaggtgaagcgaagtgc

SEQ ID NO: 156 - DNA, 20 bp, synthetic construct
  source 1..20: mol_type = other DNA
  modified_base 1: mod_base = OTHER; note = 2'-O-methoxyethyl guanosine
  modified_base 2: mod_base = OTHER; note = 2'-O-methoxyethyl 5-methylcytidine
  modified_base 3: mod_base = OTHER; note = 2'-O-methoxyethyl adenosine
  modified_base 4: mod_base = OTHER; note = 2'-O-methoxyethyl guanosine
  modified_base 5: mod_base = OTHER; note = 2'-O-methoxyethyl adenosine
  modified_base 10: mod_base = OTHER; note = 2'-O-methoxyethyl adenosine
  modified_base 13: mod_base = OTHER; note = 2'-deoxy 5-methylcytidine
  modified_base 15: mod_base = OTHER; note = 2'-O-methoxyethyl adenosine
  modified_base 16: mod_base = OTHER; note = 2'-O-methoxyethyl adenosine
  modified_base 17: mod_base = OTHER; note = 2'-O-methoxyethyl guanosine
  modified_base 18: mod_base = OTHER; note = 2'-O-methoxyethyl thymidine
  modified_base 19: mod_base = OTHER; note = 2'-O-methoxyethyl guanosine
  modified_base 20: mod_base = OTHER; note = 2'-O-methoxyethyl 5-methylcytidine
  misc_feature 1..5: note = RNA
  misc_feature 6..9: note = DNA
  misc_feature 10: note = RNA
  misc_feature 11..14: note = DNA
  misc_feature 15..20: note = RNA
gcagaggtgaagcgaagtgc

SEQ ID NO: 157 - DNA, 20 bp, synthetic construct
  source 1..20: mol_type = other DNA
  modified_base 1: mod_base = OTHER; note = 2'-O-methoxyethyl guanosine
  modified_base 2: mod_base = OTHER; note = 2'-O-methoxyethyl 5-methylcytidine
  modified_base 3: mod_base = OTHER; note = 2'-O-methoxyethyl adenosine
  modified_base 4: mod_base = OTHER; note = 2'-O-methoxyethyl guanosine
  modified_base 5: mod_base = OTHER; note = 2'-O-methoxyethyl adenosine
  modified_base 6: mod_base = OTHER; note = 2'-O-methoxyethyl guanosine
  modified_base 11: mod_base = OTHER; note = 2'-O-methoxyethyl adenosine
  modified_base 13: mod_base = OTHER; note = 2'-deoxy 5-methylcytidine
  modified_base 16: mod_base = OTHER; note = 2'-O-methoxyethyl adenosine
  modified_base 17: mod_base = OTHER; note = 2'-O-methoxyethyl guanosine
  modified_base 18: mod_base = OTHER; note = 2'-O-methoxyethyl thymidine
  modified_base 19: mod_base = OTHER; note = 2'-O-methoxyethyl guanosine
  modified_base 20: mod_base = OTHER; note = 2'-O-methoxyethyl 5-methylcytidine
  misc_feature 1..6: note = RNA
  misc_feature 7..10: note = DNA
  misc_feature 11: note = RNA
  misc_feature 12..15: note = DNA
  misc_feature 16..20: note = RNA
gcagaggtgaagcgaagtgc

SEQ ID NO: 158 - DNA, 20 bp, synthetic construct
  source 1..20: mol_type = other DNA
  modified_base 1: mod_base = OTHER; note = 2'-O-methoxyethyl guanosine
  modified_base 2: mod_base = OTHER; note = 2'-O-methoxyethyl 5-methylcytidine
  modified_base 3: mod_base = OTHER; note = 2'-O-methoxyethyl adenosine
  modified_base 4: mod_base = OTHER; note = 2'-O-methoxyethyl guanosine
  modified_base 5: mod_base = OTHER; note = 2'-O-methoxyethyl adenosine
  modified_base 10: mod_base = OTHER; note = 2'-O-methoxyethyl adenosine
  modified_base 13: mod_base = OTHER; note = 2'-deoxy 5-methylcytidine
  modified_base 16: mod_base = OTHER; note = 2'-O-methoxyethyl adenosine
  modified_base 17: mod_base = OTHER; note = 2'-O-methoxyethyl guanosine
  modified_base 18: mod_base = OTHER; note = 2'-O-methoxyethyl thymidine
  modified_base 19: mod_base = OTHER; note = 2'-O-methoxyethyl guanosine
  modified_base 20: mod_base = OTHER; note = 2'-O-methoxyethyl 5-methylcytidine
  misc_feature 1..5: note = RNA
  misc_feature 6..9: note = DNA
  misc_feature 10: note = RNA
  misc_feature 11..15: note = DNA
  misc_feature 16..20: note = RNA
gcagaggtgaagcgaagtgc

SEQ ID NO: 159 - DNA, 20 bp, synthetic construct
  source 1..20: mol_type = other DNA
  modified_base 1: mod_base = OTHER; note = 2'-O-methoxyethyl guanosine
  modified_base 2: mod_base = OTHER; note = 2'-O-methoxyethyl 5-methylcytidine
  modified_base 3: mod_base = OTHER; note = 2'-O-methoxyethyl adenosine
  modified_base 4: mod_base = OTHER; note = 2'-O-methoxyethyl guanosine
  modified_base 5: mod_base = OTHER; note = 2'-O-methoxyethyl adenosine
  modified_base 10: mod_base = OTHER; note = 2'-O-methyl adenosine
  modified_base 13: mod_base = OTHER; note = 2'-deoxy 5-methylcytidine
  modified_base 16: mod_base = OTHER; note = 2'-O-methoxyethyl adenosine
  modified_base 17: mod_base = OTHER; note = 2'-O-methoxyethyl guanosine
  modified_base 18: mod_base = OTHER; note = 2'-O-methoxyethyl thymidine
  modified_base 19: mod_base = OTHER; note = 2'-O-methoxyethyl guanosine
  modified_base 20: mod_base = OTHER; note = 2'-O-methoxyethyl 5-methylcytidine
  misc_feature 1..5: note = RNA
  misc_feature 6..9: note = DNA
  misc_feature 10: note = RNA
  misc_feature 11..15: note = DNA
  misc_feature 16..20: note = RNA
gcagaggtgaagcgaagtgc

SEQ ID NO: 160 - DNA, 19 bp, synthetic construct
  source 1..19: mol_type = other DNA
  modified_base 1: mod_base = OTHER; note = 2'-O-methoxyethyl guanosine
  modified_base 2: mod_base = OTHER; note = 2'-O-methoxyethyl 5-methylcytidine
  modified_base 3: mod_base = OTHER; note = 2'-O-methoxyethyl adenosine
  modified_base 4: mod_base = OTHER; note = 2'-O-methoxyethyl guanosine
  modified_base 9: mod_base = OTHER; note = 2'-O-methoxyethyl adenosine
  modified_base 12: mod_base = OTHER; note = 2'-deoxy 5-methylcytidine
  modified_base 15: mod_base = OTHER; note = 2'-O-methoxyethyl adenosine
  modified_base 16: mod_base = OTHER; note = 2'-O-methoxyethyl guanosine
  modified_base 17: mod_base = OTHER; note = 2'-O-methoxyethyl thymidine
  modified_base 18: mod_base = OTHER; note = 2'-O-methoxyethyl guanosine
  modified_base 19: mod_base = OTHER; note = 2'-O-methoxyethyl 5-methylcytidine
  misc_feature 1..4: note = RNA
  misc_feature 5..8: note = DNA
  misc_feature 9: note = RNA
  misc_feature 10..14: note = DNA
  misc_feature 15..19: note = RNA
gcagagtgaagcgaagtgc

SEQ ID NO: 161 - DNA, 20 bp, synthetic construct
  source 1..20: mol_type = other DNA
  modified_base 1: mod_base = OTHER; note = 2'-O-methoxyethyl guanosine
  modified_base 2: mod_base = OTHER; note = 2'-O-methoxyethyl 5-methylcytidine
  modified_base 3: mod_base = OTHER; note = 2'-O-methoxyethyl adenosine
  modified_base 10: mod_base = OTHER; note = 2'-O-methoxyethyl adenosine
  modified_base 13: mod_base = OTHER; note = 2'-deoxy 5-methylcytidine
  modified_base 16: mod_base = OTHER; note = 2'-O-methoxyethyl adenosine
  modified_base 17: mod_base = OTHER; note = 2'-O-methoxyethyl guanosine
  modified_base 18: mod_base = OTHER; note = 2'-O-methoxyethyl thymidine
  modified_base 19: mod_base = OTHER; note = 2'-O-methoxyethyl guanosine
  modified_base 20: mod_base = OTHER; note = 2'-O-methoxyethyl 5-methylcytidine
  misc_feature 1..3: note = RNA
  misc_feature 4..9: note = DNA
  misc_feature 10: note = RNA
  misc_feature 11..15: note = DNA
  misc_feature 16..20: note = RNA
gcagaggtgaagcgaagtgc

SEQ ID NO: 162 - DNA, 20 bp, synthetic construct
  source 1..20: mol_type = other DNA
  modified_base 1: mod_base = OTHER; note = 2'-O-methoxyethyl guanosine
  modified_base 2: mod_base = OTHER; note = 2'-O-methoxyethyl 5-methylcytidine
  modified_base 3: mod_base = OTHER; note = 2'-O-methoxyethyl adenosine
  modified_base 4: mod_base = OTHER; note = 2'-O-methoxyethyl guanosine
  modified_base 5: mod_base = OTHER; note = 2'-O-methoxyethyl adenosine
  modified_base 13: mod_base = OTHER; note = 2'-deoxy 5-methylcytidine
  modified_base 16: mod_base = OTHER; note = 2'-O-methoxyethyl adenosine
  modified_base 17: mod_base = OTHER; note = 2'-O-methoxyethyl guanosine
  modified_base 18: mod_base = OTHER; note = 2'-O-methoxyethyl uridine
  modified_base 19: mod_base = OTHER; note = 2'-O-methoxyethyl guanosine
  modified_base 20: mod_base = OTHER; note = 2'-O-methoxyethyl 5-methylcytidine
  misc_feature 1..5: note = RNA
  misc_feature 6..15: note = DNA
  misc_feature 16..20: note = RNA
gcagaggtgaagcgaagtgc

SEQ ID NO: 163 - DNA, 20 bp, synthetic construct
  source 1..20: mol_type = other DNA
  modified_base 1: mod_base = OTHER; note = 2'-O-methoxyethyl guanosine
  modified_base 2: mod_base = OTHER; note = 2'-O-methoxyethyl 5-methylcytidine
  modified_base 3: mod_base = OTHER; note = 2'-O-methoxyethyl adenosine
  modified_base 4: mod_base = OTHER; note = 2'-O-methoxyethyl guanosine
  modified_base 5: mod_base = OTHER; note = 2'-O-methoxyethyl adenosine
  modified_base 10: mod_base = OTHER; note = 2'-O-methoxyethyl adenosine
  modified_base 13: mod_base = OTHER; note = 2'-deoxy 5-methylcytidine
  modified_base 16: mod_base = OTHER; note = 2'-O-methoxyethyl adenosine
  modified_base 17: mod_base = OTHER; note = 2'-O-methoxyethyl guanosine
  modified_base 18: mod_base = OTHER; note = 2'-O-methoxyethyl uridine
  modified_base 19: mod_base = OTHER; note = 2'-O-methoxyethyl guanosine
  modified_base 20: mod_base = OTHER; note = 2'-O-methoxyethyl 5-methylcytidine
  misc_feature 1..5: note = RNA
  misc_feature 6..9: note = DNA
  misc_feature 10: note = RNA
  misc_feature 11..15: note = DNA
  misc_feature 16..20: note = RNA
gcagaggtgaagcgaagtgc

SEQ ID NO: 164 - DNA, 20 bp, synthetic construct
  source 1..20: mol_type = other DNA
  modified_base 1: mod_base = OTHER; note = 2'-O-methoxyethyl guanosine
  modified_base 2: mod_base = OTHER; note = 2'-O-methoxyethyl 5-methylcytidine
  modified_base 3: mod_base = OTHER; note = 2'-O-methoxyethyl adenosine
  modified_base 4: mod_base = OTHER; note = 2'-O-methoxyethyl guanosine
  modified_base 5: mod_base = OTHER; note = 2'-O-methoxyethyl adenosine
  modified_base 6: mod_base = OTHER; note = 2'-O-methoxyethyl guanosine
  modified_base 13: mod_base = OTHER; note = 2'-deoxy 5-methylcytidine
  modified_base 16: mod_base = OTHER; note = 2'-O-methoxyethyl adenosine
  modified_base 17: mod_base = OTHER; note = 2'-O-methoxyethyl guanosine
  modified_base 18: mod_base = OTHER; note = 2'-O-methoxyethyl uridine
  modified_base 19: mod_base = OTHER; note = 2'-O-methoxyethyl guanosine
  modified_base 20: mod_base = OTHER; note = 2'-O-methoxyethyl 5-methylcytidine
  misc_feature 1..6: note = RNA
  misc_feature 7..15: note = DNA
  misc_feature 16..20: note = RNA
gcagaggtgaagcgaagtgc

SEQ ID NO: 165 - DNA, 20 bp, synthetic construct
  source 1..20: mol_type = other DNA
  modified_base 1: mod_base = OTHER; note = 2'-O-methoxyethyl guanosine
  modified_base 2: mod_base = OTHER; note = 2'-O-methoxyethyl 5-methylcytidine
  modified_base 3: mod_base = OTHER; note = 2'-O-methoxyethyl adenosine
  modified_base 4: mod_base = OTHER; note = 2'-O-methoxyethyl guanosine
  modified_base 5: mod_base = OTHER; note = 2'-O-methoxyethyl adenosine
  modified_base 7: mod_base = OTHER; note = 2'-O-methoxyethyl guanosine
  modified_base 13: mod_base = OTHER; note = 2'-deoxy 5-methylcytidine
  modified_base 16: mod_base = OTHER; note = 2'-O-methoxyethyl adenosine
  modified_base 17: mod_base = OTHER; note = 2'-O-methoxyethyl guanosine
  modified_base 18: mod_base = OTHER; note = 2'-O-methoxyethyl uridine
  modified_base 19: mod_base = OTHER; note = 2'-O-methoxyethyl guanosine
  modified_base 20: mod_base = OTHER; note = 2'-O-methoxyethyl 5-methylcytidine
  misc_feature 1..5: note = RNA
  misc_feature 6: note = DNA
  misc_feature 7: note = RNA
  misc_feature 8..15: note = DNA
  misc_feature 16..20: note = RNA
gcagaggtgaagcgaagtgc

SEQ ID NO: 166 - DNA, 20 bp, synthetic construct
  source 1..20: mol_type = other DNA
  modified_base 1: mod_base = OTHER; note = 2'-O-methoxyethyl guanosine
  modified_base 2: mod_base = OTHER; note = 2'-O-methoxyethyl 5-methylcytidine
  modified_base 3: mod_base = OTHER; note = 2'-O-methoxyethyl adenosine
  modified_base 4: mod_base = OTHER; note = 2'-O-methoxyethyl guanosine
  modified_base 5: mod_base = OTHER; note = 2'-O-methoxyethyl adenosine
  modified_base 8: mod_base = OTHER; note = 2'-O-methoxyethyl uridine
  modified_base 13: mod_base = OTHER; note = 2'-deoxy 5-methylcytidine
  modified_base 16: mod_base = OTHER; note = 2'-O-methoxyethyl adenosine
  modified_base 17: mod_base = OTHER; note = 2'-O-methoxyethyl guanosine
  modified_base 18: mod_base = OTHER; note = 2'-O-methoxyethyl uridine
  modified_base 19: mod_base = OTHER; note = 2'-O-methoxyethyl guanosine
  modified_base 20: mod_base = OTHER; note = 2'-O-methoxyethyl 5-methylcytidine
  misc_feature 1..5: note = RNA
  misc_feature 6..7: note = DNA
  misc_feature 8: note = RNA
  misc_feature 9..15: note = DNA
  misc_feature 16..20: note = RNA
gcagaggtgaagcgaagtgc

SEQ ID NO: 167 - DNA, 20 bp, synthetic construct
  source 1..20: mol_type = other DNA
  modified_base 1: mod_base = OTHER; note = 2'-O-methoxyethyl guanosine
  modified_base 2: mod_base = OTHER; note = 2'-O-methoxyethyl 5-methylcytidine
  modified_base 3: mod_base = OTHER; note = 2'-O-methoxyethyl adenosine
  modified_base 4: mod_base = OTHER; note = 2'-O-methoxyethyl guanosine
  modified_base 5: mod_base = OTHER; note = 2'-O-methoxyethyl adenosine
  modified_base 9: mod_base = OTHER; note = 2'-O-methoxyethyl guanosine
  modified_base 13: mod_base = OTHER; note = 2'-deoxy 5-methylcytidine
  modified_base 16: mod_base = OTHER; note = 2'-O-methoxyethyl adenosine
  modified_base 17: mod_base = OTHER; note = 2'-O-methoxyethyl guanosine
  modified_base 18: mod_base = OTHER; note = 2'-O-methoxyethyl uridine
  modified_base 19: mod_base = OTHER; note = 2'-O-methoxyethyl guanosine
  modified_base 20: mod_base = OTHER; note = 2'-O-methoxyethyl 5-methylcytidine
  misc_feature 1..5: note = RNA
  misc_feature 6..8: note = DNA
  misc_feature 9: note = RNA
  misc_feature 10..15: note = DNA
  misc_feature 16..20: note = RNA
gcagaggtgaagcgaagtgc

SEQ ID NO: 168 - DNA, 20 bp, synthetic construct
  source 1..20: mol_type = other DNA
  modified_base 1: mod_base = OTHER; note = 2'-O-methoxyethyl guanosine
  modified_base 2: mod_base = OTHER; note = 2'-O-methoxyethyl 5-methylcytidine
  modified_base 3: mod_base = OTHER; note = 2'-O-methoxyethyl adenosine
  modified_base 4: mod_base = OTHER; note = 2'-O-methoxyethyl guanosine
  modified_base 5: mod_base = OTHER; note = 2'-O-methoxyethyl adenosine
  modified_base 11: mod_base = OTHER; note = 2'-O-methoxyethyl adenosine
  modified_base 13: mod_base = OTHER; note = 2'-deoxy 5-methylcytidine
  modified_base 16: mod_base = OTHER; note = 2'-O-methoxyethyl adenosine
  modified_base 17: mod_base = OTHER; note = 2'-O-methoxyethyl guanosine
  modified_base 18: mod_base = OTHER; note = 2'-O-methoxyethyl uridine
  modified_base 19: mod_base = OTHER; note = 2'-O-methoxyethyl guanosine
  modified_base 20: mod_base = OTHER; note = 2'-O-methoxyethyl 5-methylcytidine
  misc_feature 1..5: note = RNA
  misc_feature 6..10: note = DNA
  misc_feature 11: note = RNA
  misc_feature 12..15: note = DNA
  misc_feature 16..20: note = RNA
gcagaggtgaagcgaagtgc

SEQ ID NO: 169 - DNA, 20 bp, synthetic construct
  source 1..20: mol_type = other DNA
  modified_base 1: mod_base = OTHER; note = 2'-O-methoxyethyl guanosine
  modified_base 2: mod_base = OTHER; note = 2'-O-methoxyethyl 5-methylcytidine
  modified_base 3: mod_base = OTHER; note = 2'-O-methoxyethyl adenosine
  modified_base 4: mod_base = OTHER; note = 2'-O-methoxyethyl guanosine
  modified_base 5: mod_base = OTHER; note = 2'-O-methoxyethyl adenosine
  modified_base 12: mod_base = OTHER; note = 2'-O-methoxyethyl guanosine
  modified_base 13: mod_base = OTHER; note = 2'-deoxy 5-methylcytidine
  modified_base 16: mod_base = OTHER; note = 2'-O-methoxyethyl adenosine
  modified_base 17: mod_base = OTHER; note = 2'-O-methoxyethyl guanosine
  modified_base 18: mod_base = OTHER; note = 2'-O-methoxyethyl uridine
  modified_base 19: mod_base = OTHER; note = 2'-O-methoxyethyl guanosine
  modified_base 20: mod_base = OTHER; note = 2'-O-methoxyethyl 5-methylcytidine
  misc_feature 1..5: note = RNA
  misc_feature 6..11: note = DNA
  misc_feature 12: note = RNA
  misc_feature 13..15: note = DNA
  misc_feature 16..20: note = RNA
gcagaggtgaagcgaagtgc

SEQ ID NO: 170 - DNA, 20 bp, synthetic construct
  source 1..20: mol_type = other DNA
  modified_base 1: mod_base = OTHER; note = 2'-O-methoxyethyl guanosine
  modified_base 2: mod_base = OTHER; note = 2'-O-methoxyethyl 5-methylcytidine
  modified_base 3: mod_base = OTHER; note = 2'-O-methoxyethyl adenosine
  modified_base 4: mod_base = OTHER; note = 2'-O-methoxyethyl guanosine
  modified_base 5: mod_base = OTHER; note = 2'-O-methoxyethyl adenosine
  modified_base 13: mod_base = OTHER; note = 2'-O-methoxyethyl 5-methylcytidine
  modified_base 16: mod_base = OTHER; note = 2'-O-methoxyethyl adenosine
  modified_base 17: mod_base = OTHER; note = 2'-O-methoxyethyl guanosine
  modified_base 18: mod_base = OTHER; note = 2'-O-methoxyethyl uridine
  modified_base 19: mod_base = OTHER; note = 2'-O-methoxyethyl guanosine
  modified_base 20: mod_base = OTHER; note = 2'-O-methoxyethyl 5-methylcytidine
  misc_feature 1..5: note = RNA
  misc_feature 6..12: note = DNA
  misc_feature 13: note = RNA
  misc_feature 14..15: note = DNA
  misc_feature 16..20: note = RNA
gcagaggtgaagcgaagtgc

SEQ ID NO: 171 - DNA, 20 bp, synthetic construct
  source 1..20: mol_type = other DNA
  modified_base 1: mod_base = OTHER; note = 2'-O-methoxyethyl guanosine
  modified_base 2: mod_base = OTHER; note = 2'-O-methoxyethyl 5-methylcytidine
  modified_base 3: mod_base = OTHER; note = 2'-O-methoxyethyl adenosine
  modified_base 4: mod_base = OTHER; note = 2'-O-methoxyethyl guanosine
  modified_base 5: mod_base = OTHER; note = 2'-O-methoxyethyl adenosine
  modified_base 13: mod_base = OTHER; note = 2'-deoxy 5-methylcytidine
  modified_base 14: mod_base = OTHER; note = 2'-O-methoxyethyl guanosine
  modified_base 16: mod_base = OTHER; note = 2'-O-methoxyethyl adenosine
  modified_base 17: mod_base = OTHER; note = 2'-O-methoxyethyl guanosine
  modified_base 18: mod_base = OTHER; note = 2'-O-methoxyethyl uridine
  modified_base 19: mod_base = OTHER; note = 2'-O-methoxyethyl guanosine
  modified_base 20: mod_base = OTHER; note = 2'-O-methoxyethyl 5-methylcytidine
  misc_feature 1..5: note = RNA
  misc_feature 6..13: note = DNA
  misc_feature 14: note = RNA
  misc_feature 15: note = DNA
  misc_feature 16..20: note = RNA
gcagaggtgaagcgaagtgc

SEQ ID NO: 172 - DNA, 20 bp, synthetic construct
  source 1..20: mol_type = other DNA
  modified_base 1: mod_base = OTHER; note = 2'-O-methoxyethyl guanosine
  modified_base 2: mod_base = OTHER; note = 2'-O-methoxyethyl 5-methylcytidine
  modified_base 3: mod_base = OTHER; note = 2'-O-methoxyethyl adenosine
  modified_base 4: mod_base = OTHER; note = 2'-O-methoxyethyl guanosine
  modified_base 5: mod_base = OTHER; note = 2'-O-methoxyethyl adenosine
  modified_base 13: mod_base = OTHER; note = 2'-deoxy 5-methylcytidine
  modified_base 15: mod_base = OTHER; note = 2'-O-methoxyethyl adenosine
  modified_base 16: mod_base = OTHER; note = 2'-O-methoxyethyl adenosine
  modified_base 17: mod_base = OTHER; note = 2'-O-methoxyethyl guanosine
  modified_base 18: mod_base = OTHER; note = 2'-O-methoxyethyl uridine
  modified_base 19: mod_base = OTHER; note = 2'-O-methoxyethyl guanosine
  modified_base 20: mod_base = OTHER; note = 2'-O-methoxyethyl 5-methylcytidine
  misc_feature 1..5: note = RNA
  misc_feature 6..14: note = DNA
  misc_feature 15..20: note = RNA
gcagaggtgaagcgaagtgc

SEQ ID NO: 173 - DNA, 20 bp, synthetic construct
  source 1..20: mol_type = other DNA
  modified_base 1: mod_base = OTHER; note = 2'-O-methoxyethyl guanosine
  modified_base 2: mod_base = OTHER; note = 2'-O-methoxyethyl 5-methylcytidine
  modified_base 3: mod_base = OTHER; note = 2'-O-methoxyethyl adenosine
  modified_base 4: mod_base = OTHER; note = 2'-O-methoxyethyl guanosine
  modified_base 5: mod_base = OTHER; note = 2'-O-methoxyethyl adenosine
  modified_base 10: mod_base = OTHER; note = 2'-O-methoxyethyl adenosine
  modified_base 13: mod_base = OTHER; note = 2'-deoxy 5-methylcytidine
  modified_base 15: mod_base = OTHER; note = 2'-O-methoxyethyl adenosine
  modified_base 16: mod_base = OTHER; note = 2'-O-methoxyethyl adenosine
  modified_base 17: mod_base = OTHER; note = 2'-O-methoxyethyl guanosine
  modified_base 18: mod_base = OTHER; note = 2'-O-methoxyethyl uridine
  modified_base 19: mod_base = OTHER; note = 2'-O-methoxyethyl guanosine
  modified_base 20: mod_base = OTHER; note = 2'-O-methoxyethyl 5-methylcytidine
  misc_feature 1..5: note = RNA
  misc_feature 6..9: note = DNA
  misc_feature 10: note = RNA
  misc_feature 11..14: note = DNA
  misc_feature 15..20: note = RNA
gcagaggtgaagcgaagtgc

SEQ ID NO: 174 - DNA, 20 bp, synthetic construct
  source 1..20: mol_type = other DNA
  modified_base 1: mod_base = OTHER; note = 2'-O-methoxyethyl guanosine
  modified_base 2: mod_base = OTHER; note = 2'-O-methoxyethyl 5-methylcytidine
  modified_base 3: mod_base = OTHER; note = 2'-O-methoxyethyl adenosine
  modified_base 4: mod_base = OTHER; note = 2'-O-methoxyethyl guanosine
  modified_base 5: mod_base = OTHER; note = 2'-O-methoxyethyl adenosine
  modified_base 6: mod_base = OTHER; note = 2'-O-methoxyethyl guanosine
  modified_base 11: mod_base = OTHER; note = 2'-O-methoxyethyl adenosine
  modified_base 13: mod_base = OTHER; note = 2'-deoxy 5-methylcytidine
  modified_base 16: mod_base = OTHER; note = 2'-O-methoxyethyl adenosine
  modified_base 17: mod_base = OTHER; note = 2'-O-methoxyethyl guanosine
  modified_base 18: mod_base = OTHER; note = 2'-O-methoxyethyl uridine
  modified_base 19: mod_base = OTHER; note = 2'-O-methoxyethyl guanosine
  modified_base 20: mod_base = OTHER; note = 2'-O-methoxyethyl 5-methylcytidine
  misc_feature 1..6: note = RNA
  misc_feature 7..10: note = DNA
  misc_feature 11: note = RNA
  misc_feature 12..15: note = DNA
  misc_feature 16..20: note = RNA
gcagaggtgaagcgaagtgc

SEQ ID NO: 175 - DNA, 20 bp, synthetic construct
  source 1..20: mol_type = other DNA
  modified_base 1: mod_base = OTHER; note = 2'-O-methoxyethyl guanosine
  modified_base 2: mod_base = OTHER; note = 2'-O-methoxyethyl 5-methylcytidine
  modified_base 3: mod_base = OTHER; note = 2'-O-methoxyethyl adenosine
  modified_base 4: mod_base = OTHER; note = 2'-O-methoxyethyl guanosine
  modified_base 5: mod_base = OTHER; note = 2'-O-methoxyethyl adenosine
  modified_base 10: mod_base = OTHER; note = 2'-O-methoxyethyl adenosine
  modified_base 13: mod_base = OTHER; note = 2'-deoxy 5-methylcytidine
  modified_base 16: mod_base = OTHER; note = 2'-O-methoxyethyl adenosine
  modified_base 17: mod_base = OTHER; note = 2'-O-methoxyethyl guanosine
  modified_base 18: mod_base = OTHER; note = 2'-O-methoxyethyl uridine
  modified_base 19: mod_base = OTHER; note = 2'-O-methoxyethyl guanosine
  modified_base 20: mod_base = OTHER; note = 2'-O-methoxyethyl 5-methylcytidine
  misc_feature 1..5: note = RNA
  misc_feature 6..9: note = DNA
  misc_feature 10: note = RNA
  misc_feature 11..15: note = DNA
  misc_feature 16..20: note = RNA
gcagaggtgaagcgaagtgc

SEQ ID NO: 176 - DNA, 20 bp, synthetic construct
  source 1..20: mol_type = other DNA
  modified_base 1: mod_base = OTHER; note = 2'-O-methoxyethyl guanosine
  modified_base 2: mod_base = OTHER; note = 2'-O-methoxyethyl 5-methylcytidine
  modified_base 3: mod_base = OTHER; note = 2'-O-methoxyethyl adenosine
  modified_base 4: mod_base = OTHER; note = 2'-O-methoxyethyl guanosine
  modified_base 5: mod_base = OTHER; note = 2'-O-methoxyethyl adenosine
  modified_base 11: mod_base = OTHER; note = 2'-O-methoxyethyl adenosine
  modified_base 13: mod_base = OTHER; note = 2'-deoxy 5-methylcytidine
  modified_base 16: mod_base = OTHER; note = 2'-O-methoxyethyl adenosine
  modified_base 17: mod_base = OTHER; note = 2'-O-methoxyethyl guanosine
  modified_base 18: mod_base = OTHER; note = 2'-O-methoxyethyl uridine
  modified_base 19: mod_base = OTHER; note = 2'-O-methoxyethyl guanosine
  modified_base 20: mod_base = OTHER; note = 2'-O-methoxyethyl 5-methylcytidine
  misc_feature 1..5: note = RNA
  misc_feature 6..10: note = DNA
  misc_feature 11: note = RNA
  misc_feature 12..15: note = DNA
  misc_feature 16..20: note = RNA
gcagaggtgaagcgaagtgc

SEQ ID NO: 177 - DNA, 20 bp, synthetic construct
  source 1..20: mol_type = other DNA
  modified_base 1: mod_base = OTHER; note = 2'-O-methoxyethyl guanosine
  modified_base 2: mod_base = OTHER; note = 2'-O-methoxyethyl 5-methylcytidine
  modified_base 3: mod_base = OTHER; note = 2'-O-methoxyethyl adenosine
  modified_base 4: mod_base = OTHER; note = 2'-O-methoxyethyl guanosine
  modified_base 5: mod_base = OTHER; note = 2'-O-methoxyethyl adenosine
  modified_base 10: mod_base = OTHER; note = 2'-O-methoxyethyl adenosine
  modified_base 13: mod_base = OTHER; note = 2'-deoxy 5-methylcytidine
  modified_base 15: mod_base = OTHER; note = 2'-O-methoxyethyl adenosine
  modified_base 16: mod_base = OTHER; note = 2'-O-methoxyethyl adenosine
  modified_base 17: mod_base = OTHER; note = 2'-O-methoxyethyl guanosine
  modified_base 18: mod_base = OTHER; note = 2'-O-methoxyethyl uridine
  modified_base 19: mod_base = OTHER; note = 2'-O-methoxyethyl guanosine
  modified_base 20: mod_base = OTHER; note = 2'-O-methoxyethyl 5-methylcytidine
  misc_feature 1..5: note = RNA
  misc_feature 6..9: note = DNA
  misc_feature 10: note = RNA
  misc_feature 11..14: note = DNA
  misc_feature 15..20: note = RNA
gcagaggtgaagcgaagtgc

SEQ ID NO: 178 - DNA, 20 bp, synthetic construct
  source 1..20: mol_type = other DNA
  modified_base 1: mod_base = OTHER; note = 2'-O-methoxyethyl guanosine
  modified_base 2: mod_base = OTHER; note = 2'-O-methoxyethyl 5-methylcytidine
  modified_base 3: mod_base = OTHER; note = 2'-O-methoxyethyl adenosine
  modified_base 4: mod_base = OTHER; note = 2'-O-methoxyethyl guanosine
  modified_base 5: mod_base = OTHER; note = 2'-O-methoxyethyl adenosine
  modified_base 16: mod_base = OTHER; note = 2'-O-methoxyethyl adenosine
  modified_base 17: mod_base = OTHER; note = 2'-O-methoxyethyl guanosine
  modified_base 18: mod_base = OTHER; note = 2'-O-methoxyethyl uridine
  modified_base 19: mod_base = OTHER; note = 2'-O-methoxyethyl guanosine
  modified_base 20: mod_base = OTHER; note = 2'-O-methoxyethyl 5-methylcytidine
  misc_feature 1..5: note = RNA
  misc_feature 6..15: note = DNA
  misc_feature 16..20: note = RNA
gcagaggtgaagtgaagtgc

SEQ ID NO: 179 - DNA, 20 bp, synthetic construct
  source 1..20: mol_type = other DNA
  modified_base 1: mod_base = OTHER; note = 2'-O-methoxyethyl guanosine
  modified_base 2: mod_base = OTHER; note = 2'-O-methoxyethyl 5-methylcytidine
  modified_base 3: mod_base = OTHER; note = 2'-O-methoxyethyl adenosine
  modified_base 4: mod_base = OTHER; note = 2'-O-methoxyethyl guanosine
  modified_base 5: mod_base = OTHER; note = 2'-O-methoxyethyl adenosine
  modified_base 10: mod_base = OTHER; note = 2'-O-methoxyethyl adenosine
  modified_base 16: mod_base = OTHER; note = 2'-O-methoxyethyl adenosine
  modified_base 17: mod_base = OTHER; note = 2'-O-methoxyethyl guanosine
  modified_base 18: mod_base = OTHER; note = 2'-O-methoxyethyl uridine
  modified_base 19: mod_base = OTHER; note = 2'-O-methoxyethyl guanosine
  modified_base 20: mod_base = OTHER; note = 2'-O-methoxyethyl 5-methylcytidine
  misc_feature 1..5: note = RNA
  misc_feature 6..9: note = DNA
  misc_feature 10: note = RNA
  misc_feature 11..15: note = DNA
  misc_feature 16..20: note = RNA
gcagaggtgaagtgaagtgc

SEQ ID NO: 180 - DNA, 40 bp, synthetic construct; identical to SEQ ID NO: 11
  source 1..40: mol_type = other DNA
  modified_base 1: mod_base = OTHER; note = 2'-O-methyl 5-methylcytidine
  modified_base 2: mod_base = OTHER; note = 2'-O-methyl adenosine
  modified_base 3: mod_base = OTHER; note = 2'-O-methyl adenosine
  modified_base 4: mod_base = OTHER; note = 2'-O-methyl adenosine
  modified_base 5: mod_base = OTHER; note = 2'-O-methyl 5-methylcytidine
  modified_base 6: mod_base = OTHER; note = 2'-O-methyl adenosine
  modified_base 7: mod_base = OTHER; note = 2'-O-methyl adenosine
  modified_base 8: mod_base = OTHER; note = 2'-O-methyl 5-methylcytidine
  modified_base 9: mod_base = OTHER; note = 2'-O-methyl adenosine
  modified_base 10: mod_base = OTHER; note = 2'-O-methyl adenosine
  modified_base 11: mod_base = OTHER; note = 2'-O-methyl guanosine
  modified_base 12: mod_base = OTHER; note = 2'-O-methyl 5-methylcytidine
  modified_base 13: mod_base = OTHER; note = 2'-O-methyl adenosine
  modified_base 14: mod_base = OTHER; note = 2'-O-methyl guanosine
  modified_base 15: mod_base = OTHER; note = 2'-O-methyl adenosine
  modified_base 23: mod_base = OTHER; note = 2'-deoxy cytidine
  modified_base 26: mod_base = OTHER; note = 2'-O-methyl adenosine
  modified_base 27: mod_base = OTHER; note = 2'-O-methyl guanosine
  modified_base 28: mod_base = OTHER; note = 2'-O-methyl thymidine
  modified_base 29: mod_base = OTHER; note = 2'-O-methyl guanosine
  modified_base 30: mod_base = OTHER; note = 2'-O-methyl 5-methylcytidine
  modified_base 31: mod_base = OTHER; note = 2'-O-methyl 5-methylcytidine
  modified_base 32: mod_base = OTHER; note = 2'-O-methyl adenosine
  modified_base 33: mod_base = OTHER; note = 2'-O-methyl adenosine
  modified_base 34: mod_base = OTHER; note = 2'-O-methyl 5-methylcytidine
  modified_base 35: mod_base = OTHER; note = 2'-O-methyl adenosine
  modified_base 36: mod_base = OTHER; note = 2'-O-methyl adenosine
  modified_base 37: mod_base = OTHER; note = 2'-O-methyl 5-methylcytidine
  modified_base 38: mod_base = OTHER; note = 2'-O-methyl adenosine
  modified_base 39: mod_base = OTHER; note = 2'-O-methyl adenosine
  modified_base 40: mod_base = OTHER; note = 2'-O-methyl adenosine
  misc_feature 1..15: note = RNA
  misc_feature 16..25: note = DNA
  misc_feature 26..40: note = RNA

SEQ ID NO: 181 - DNA, 40 bp, synthetic construct
  source 1..40: mol_type = other DNA
  modified_base 1: mod_base = OTHER; note = 2'-O-methoxyethyl adenosine
  modified_base 2: mod_base = OTHER; note = 2'-O-methoxyethyl adenosine
  modified_base 3: mod_base = OTHER; note = 2'-O-methoxyethyl adenosine
  modified_base 4: mod_base = OTHER; note = 2'-O-methoxyethyl 5-methylcytidine
  modified_base 5: mod_base = OTHER; note = 2'-O-methoxyethyl adenosine
  modified_base 6: mod_base = OTHER; note = 2'-O-methoxyethyl adenosine
  modified_base 7: mod_base = OTHER; note = 2'-O-methoxyethyl 5-methylcytidine
  modified_base 8: mod_base = OTHER; note = 2'-O-methoxyethyl adenosine
  modified_base 9: mod_base = OTHER; note = 2'-O-methoxyethyl adenosine
  modified_base 10: mod_base = OTHER; note = 2'-O-methoxyethyl adenosine
  modified_base 11: mod_base = OTHER; note = 2'-O-methoxyethyl guanosine
  modified_base 12: mod_base = OTHER; note = 2'-O-methoxyethyl 5-methylcytidine
  modified_base 13: mod_base = OTHER; note = 2'-O-methoxyethyl adenosine
  modified_base 14: mod_base = OTHER; note = 2'-O-methoxyethyl guanosine
  modified_base 15: mod_base = OTHER; note = 2'-O-methoxyethyl adenosine
  modified_base 23: mod_base = OTHER; note = 2'-deoxy 5-methylcytidine
  modified_base 26: mod_base = OTHER; note = 2'-O-methoxyethyl adenosine
  modified_base 27: mod_base = OTHER; note = 2'-O-methoxyethyl guanosine
  modified_base 28: mod_base = OTHER; note = 2'-O-methoxyethyl thymidine
  modified_base 29: mod_base = OTHER; note = 2'-O-methoxyethyl guanosine
  modified_base 30: mod_base = OTHER; note = 2'-O-methoxyethyl 5-methylcytidine
  modified_base 31: mod_base = OTHER; note = 2'-O-methoxyethyl adenosine
  modified_base 32: mod_base = OTHER; note = 2'-O-methoxyethyl adenosine
  modified_base 33: mod_base = OTHER; note = 2'-O-methoxyethyl adenosine
  modified_base 34: mod_base = OTHER; note = 2'-O-methoxyethyl 5-methylcytidine
  modified_base 35: mod_base = OTHER; note = 2'-O-methoxyethyl adenosine
  modified_base 36: mod_base = OTHER; note = 2'-O-methoxyethyl adenosine
  modified_base 37: mod_base = OTHER; note = 2'-O-methoxyethyl 5-methylcytidine
  modified_base 38: mod_base = OTHER; note = 2'-O-methoxyethyl adenosine
  modified_base 39: mod_base = OTHER; note = 2'-O-methoxyethyl adenosine
  modified_base 40: mod_base = OTHER; note = 2'-O-methoxyethyl adenosine
  misc_feature 1..15: note = RNA
  misc_feature 16..25: note = DNA
  misc_feature 26..40: note = RNA
aaacaacaaagcagaggtgaagcgaagtgcaaacaacaaa

SEQ ID NO: 182 - DNA, 40 bp, synthetic construct; identical to SEQ ID NO: 181
  source 1..40: mol_type = other DNA
  modified_base 1: mod_base = OTHER; note = 2'-O-methoxyethyl adenosine
  modified_base 2: mod_base = OTHER; note = 2'-O-methoxyethyl adenosine
  modified_base 3: mod_base = OTHER; note = 2'-O-methoxyethyl adenosine
  modified_base 4: mod_base = OTHER; note = 2'-O-methoxyethyl 5-methylcytidine
  modified_base 5: mod_base = OTHER; note = 2'-O-methoxyethyl adenosine
  modified_base 6: mod_base = OTHER; note = 2'-O-methoxyethyl adenosine
  modified_base 7: mod_base = OTHER; note = 2'-O-methoxyethyl 5-methylcytidine
  modified_base 8: mod_base = OTHER; note = 2'-O-methoxyethyl adenosine
  modified_base 9: mod_base = OTHER; note = 2'-O-methoxyethyl adenosine
  modified_base 10: mod_base = OTHER; note = 2'-O-methoxyethyl adenosine
  modified_base 12: mod_base = OTHER; note = 2'-deoxy 5-methylcytidine
  modified_base 23: mod_base = OTHER; note = 2'-deoxy 5-methylcytidine
  modified_base 30: mod_base = OTHER; note = 2'-deoxy 5-methylcytidine
  modified_base 31: mod_base = OTHER; note = 2'-O-methoxyethyl adenosine
  modified_base 32: mod_base = OTHER; note = 2'-O-methoxyethyl adenosine
  modified_base 33: mod_base = OTHER; note = 2'-O-methoxyethyl adenosine
  modified_base 34: mod_base = OTHER; note = 2'-O-methoxyethyl 5-methylcytidine
  modified_base 35: mod_base = OTHER; note = 2'-O-methoxyethyl adenosine
  modified_base 36: mod_base = OTHER; note = 2'-O-methoxyethyl adenosine
  modified_base 37: mod_base = OTHER; note = 2'-O-methoxyethyl 5-methylcytidine
  modified_base 38: mod_base = OTHER; note = 2'-O-methoxyethyl adenosine
  modified_base 39: mod_base = OTHER; note = 2'-O-methoxyethyl adenosine
  modified_base 40: mod_base = OTHER; note = 2'-O-methoxyethyl adenosine
  misc_feature 1..10: note = RNA
  misc_feature 11..30: note = DNA
  misc_feature 31..40: note = RNA

SEQ ID NO: 183 - DNA, 30 bp, synthetic construct
  source 1..30: mol_type = other DNA
  modified_base 1: mod_base = OTHER; note = 2'-O-methoxyethyl adenosine
  modified_base 2: mod_base = OTHER; note = 2'-O-methoxyethyl 5-methylcytidine
  modified_base 3: mod_base = OTHER; note = 2'-O-methoxyethyl adenosine
  modified_base 4: mod_base = OTHER; note = 2'-O-methoxyethyl adenosine
  modified_base 5: mod_base = OTHER; note = 2'-O-methoxyethyl adenosine
  modified_base 6: mod_base = OTHER; note = 2'-O-methoxyethyl guanosine
  modified_base 7: mod_base = OTHER; note = 2'-O-methoxyethyl 5-methylcytidine
  modified_base 8: mod_base = OTHER; note = 2'-O-methoxyethyl adenosine
  modified_base 9: mod_base = OTHER; note = 2'-O-methoxyethyl guanosine
  modified_base 10: mod_base = OTHER; note = 2'-O-methoxyethyl adenosine
  modified_base 18: mod_base = OTHER; note = 2'-deoxy 5-methylcytidine
  modified_base 21: mod_base = OTHER; note = 2'-O-methoxyethyl adenosine
  modified_base 22: mod_base = OTHER; note = 2'-O-methoxyethyl guanosine
  modified_base 23: mod_base = OTHER; note = 2'-O-methoxyethyl thymidine
  modified_base 24: mod_base = OTHER; note = 2'-O-methoxyethyl guanosine
  modified_base 25: mod_base = OTHER; note = 2'-O-methoxyethyl 5-methylcytidine
  modified_base 26: mod_base = OTHER; note = 2'-O-methoxyethyl adenosine
  modified_base 27: mod_base = OTHER; note = 2'-O-methoxyethyl adenosine
  modified_base 28: mod_base = OTHER; note = 2'-O-methoxyethyl adenosine
  modified_base 29: mod_base = OTHER; note = 2'-O-methoxyethyl 5-methylcytidine
  modified_base 30: mod_base = OTHER; note = 2'-O-methoxyethyl adenosine
  misc_feature 1..10: note = RNA
  misc_feature 11..20: note = DNA
  misc_feature 21..30: note = RNA
acaaagcagaggtgaagcgaagtgcaaaca

SEQ ID NO: 184 - DNA, 30 bp, synthetic construct; identical to SEQ ID NO: 183
  source 1..30: mol_type = other DNA
  modified_base 1: mod_base = OTHER; note = 2'-O-methoxyethyl adenosine
  modified_base 2: mod_base = OTHER; note = 2'-O-methoxyethyl 5-methylcytidine
  modified_base 3: mod_base = OTHER; note = 2'-O-methoxyethyl adenosine
  modified_base 4: mod_base = OTHER; note = 2'-O-methoxyethyl adenosine
  modified_base 5: mod_base = OTHER; note = 2'-O-methoxyethyl adenosine
  modified_base 7: mod_base = OTHER; note = 2'-deoxy 5-methylcytidine
  modified_base 18: mod_base = OTHER; note = 2'-deoxy 5-methylcytidine
  modified_base 25: mod_base = OTHER; note = 2'-deoxy 5-methylcytidine
  modified_base 26: mod_base = OTHER; note = 2'-O-methoxyethyl adenosine
  modified_base 27: mod_base = OTHER; note = 2'-O-methoxyethyl adenosine
  modified_base 28: mod_base = OTHER; note = 2'-O-methoxyethyl adenosine
  modified_base 29: mod_base = OTHER; note = 2'-O-methoxyethyl 5-methylcytidine
  modified_base 30: mod_base = OTHER; note = 2'-O-methoxyethyl adenosine
  misc_feature 1..5: note = RNA
  misc_feature 6..25: note = DNA
  misc_feature 26..30: note = RNA

SEQ ID NO: 185 - DNA, 40 bp, synthetic construct; identical to SEQ ID NO: 12
  source 1..40: mol_type = other DNA
  modified_base 1: mod_base = OTHER; note = 2'-O-methoxyethyl guanosine
  modified_base 2: mod_base = OTHER; note = 2'-O-methoxyethyl 5-methylcytidine
  modified_base 3: mod_base = OTHER; note = 2'-O-methoxyethyl adenosine
  modified_base 4: mod_base = OTHER; note = 2'-O-methoxyethyl guanosine
  modified_base 5: mod_base = OTHER; note = 2'-O-methoxyethyl adenosine
  modified_base 13: mod_base = OTHER; note = 2'-deoxy 5-methylcytidine
  modified_base 16: mod_base = OTHER; note = 2'-O-methoxyethyl adenosine
  modified_base 17: mod_base = OTHER; note = 2'-O-methoxyethyl guanosine
  modified_base 18: mod_base = OTHER; note = 2'-O-methoxyethyl thymidine
  modified_base 19: mod_base = OTHER; note = 2'-O-methoxyethyl guanosine
  modified_base 20: mod_base = OTHER; note = 2'-O-methoxyethyl 5-methylcytidine
  modified_base 21: mod_base = OTHER; note = 2'-O-methoxyethyl adenosine
  modified_base 22: mod_base = OTHER; note = 2'-O-methoxyethyl adenosine
  modified_base 23: mod_base = OTHER; note = 2'-O-methoxyethyl adenosine
  modified_base 24: mod_base = OTHER; note = 2'-O-methoxyethyl 5-methylcytidine
  modified_base 25: mod_base = OTHER; note = 2'-O-methoxyethyl adenosine
  modified_base 26: mod_base = OTHER; note = 2'-O-methoxyethyl adenosine
  modified_base 27: mod_base = OTHER; note = 2'-O-methoxyethyl 5-methylcytidine
  modified_base 28: mod_base = OTHER; note = 2'-O-methoxyethyl adenosine
  modified_base 29: mod_base = OTHER; note = 2'-O-methoxyethyl adenosine
  modified_base 30: mod_base = OTHER; note = 2'-O-methoxyethyl adenosine
  modified_base 31: mod_base = OTHER; note = 2'-O-methoxyethyl 5-methylcytidine
  modified_base 32: mod_base = OTHER; note = 2'-O-methoxyethyl adenosine
  modified_base 33: mod_base = OTHER; note = 2'-O-methoxyethyl adenosine
  modified_base 34: mod_base = OTHER; note = 2'-O-methoxyethyl 5-methylcytidine
  modified_base 35: mod_base = OTHER; note = 2'-O-methoxyethyl adenosine
  modified_base 36: mod_base = OTHER; note = 2'-O-methoxyethyl adenosine
  modified_base 37: mod_base = OTHER; note = 2'-O-methoxyethyl adenosine
  modified_base 38: mod_base = OTHER; note = 2'-O-methoxyethyl 5-methylcytidine
  modified_base 39: mod_base = OTHER; note = 2'-O-methoxyethyl adenosine
  modified_base 40: mod_base = OTHER; note = 2'-O-methoxyethyl adenosine
  misc_feature 1..5: note = RNA
  misc_feature 6..15: note = DNA
  misc_feature 16..40: note = RNA

SEQ ID NO: 186 - DNA, 30 bp, synthetic construct
  source 1..30: mol_type = other DNA
  modified_base 1: mod_base = OTHER; note = 2'-O-methoxyethyl guanosine
  modified_base 2: mod_base = OTHER; note = 2'-O-methoxyethyl 5-methylcytidine
  modified_base 3: mod_base = OTHER; note = 2'-O-methoxyethyl adenosine
  modified_base 4: mod_base = OTHER; note = 2'-O-methoxyethyl guanosine
  modified_base 5: mod_base = OTHER; note = 2'-O-methoxyethyl adenosine
  modified_base 13: mod_base = OTHER; note = 2'-deoxy 5-methylcytidine
  modified_base 16: mod_base = OTHER; note = 2'-O-methoxyethyl adenosine
  modified_base 17: mod_base = OTHER; note = 2'-O-methoxyethyl guanosine
  modified_base 18: mod_base = OTHER; note = 2'-O-methoxyethyl thymidine
  modified_base 19: mod_base = OTHER; note = 2'-O-methoxyethyl guanosine
  modified_base 20: mod_base = OTHER; note = 2'-O-methoxyethyl 5-methylcytidine
  modified_base 21: mod_base = OTHER; note = 2'-O-methoxyethyl adenosine
  modified_base 22: mod_base = OTHER; note = 2'-O-methoxyethyl adenosine
  modified_base 23: mod_base = OTHER; note = 2'-O-methoxyethyl adenosine
  modified_base 24: mod_base = OTHER; note = 2'-O-methoxyethyl 5-methylcytidine
  modified_base 25: mod_base = OTHER; note = 2'-O-methoxyethyl adenosine
  modified_base 26: mod_base = OTHER; note = 2'-O-methoxyethyl adenosine
  modified_base 27: mod_base = OTHER; note = 2'-O-methoxyethyl 5-methylcytidine
  modified_base 28: mod_base = OTHER; note = 2'-O-methoxyethyl adenosine
  modified_base 29: mod_base = OTHER; note = 2'-O-methoxyethyl adenosine
  modified_base 30: mod_base = OTHER; note = 2'-O-methoxyethyl adenosine
  misc_feature 1..5: note = RNA
  misc_feature 6..15: note = DNA
  misc_feature 16..30: note = RNA
gcagaggtgaagcgaagtgcaaacaacaaa

SEQ ID NO: 187 - DNA, 40 bp, synthetic construct
  source 1..40: mol_type = other DNA
  modified_base 1: mod_base = OTHER; note = 2'-O-methoxyethyl adenosine
  modified_base 2: mod_base = OTHER; note = 2'-O-methoxyethyl adenosine
  modified_base 3: mod_base = OTHER; note = 2'-O-methoxyethyl 5-methylcytidine
  modified_base 4: mod_base = OTHER; note = 2'-O-methoxyethyl adenosine
  modified_base 5: mod_base = OTHER; note = 2'-O-methoxyethyl adenosine
  modified_base 6: mod_base = OTHER; note = 2'-O-methoxyethyl adenosine
  modified_base 7: mod_base = OTHER; note = 2'-O-methoxyethyl 5-methylcytidine
  modified_base 8: mod_base = OTHER; note = 2'-O-methoxyethyl adenosine
  modified_base 9: mod_base = OTHER; note = 2'-O-methoxyethyl adenosine
  modified_base 10: mod_base = OTHER; note = 2'-O-methoxyethyl 5-methylcytidine
  modified_base 11: mod_base = OTHER; note = 2'-O-methoxyethyl adenosine
  modified_base 12: mod_base = OTHER; note = 2'-O-methoxyethyl adenosine
  modified_base 13: mod_base = OTHER; note = 2'-O-methoxyethyl adenosine
  modified_base 14: mod_base = OTHER; note = 2'-O-methoxyethyl 5-methylcytidine
  modified_base 15: mod_base = OTHER; note = 2'-O-methoxyethyl adenosine
  modified_base 16: mod_base = OTHER; note = 2'-O-methoxyethyl adenosine
  modified_base 17: mod_base = OTHER; note = 2'-O-methoxyethyl 5-methylcytidine
  modified_base 18: mod_base = OTHER; note = 2'-O-methoxyethyl adenosine
  modified_base 19: mod_base = OTHER; note = 2'-O-methoxyethyl adenosine
  modified_base 20: mod_base = OTHER; note = 2'-O-methoxyethyl adenosine
  modified_base 21: mod_base = OTHER; note = 2'-O-methoxyethyl guanosine
  modified_base 22: mod_base = OTHER; note = 2'-O-methoxyethyl 5-methylcytidine
  modified_base 23: mod_base = OTHER; note = 2'-O-methoxyethyl adenosine
  modified_base 24: mod_base = OTHER; note = 2'-O-methoxyethyl guanosine
  modified_base 25: mod_base = OTHER; note = 2'-O-methoxyethyl adenosine
  modified_base 33: mod_base = OTHER; note = 2'-deoxy 5-methylcytidine
  modified_base 36: mod_base = OTHER; note = 2'-O-methoxyethyl adenosine
  modified_base 37: mod_base = OTHER; note = 2'-O-methoxyethyl guanosine
  modified_base 38: mod_base = OTHER; note = 2'-O-methoxyethyl thymidine
  modified_base 39: mod_base = OTHER; note = 2'-O-methoxyethyl guanosine
  modified_base 40: mod_base = OTHER; note = 2'-O-methoxyethyl 5-methylcytidine
  misc_feature 1..25: note = RNA
  misc_feature 26..35: note = DNA
  misc_feature 36..40: note = RNA
aacaaacaacaaacaacaaagcagaggtgaagcgaagtgc

SEQ ID NO: 188 - DNA, 30 bp, synthetic construct
  source 1..30: mol_type = other DNA
  modified_base 1: mod_base = OTHER; note = 2'-O-methoxyethyl adenosine
  modified_base 2: mod_base = OTHER; note = 2'-O-methoxyethyl adenosine
  modified_base 3: mod_base = OTHER; note = 2'-O-methoxyethyl adenosine
  modified_base 4: mod_base = OTHER; note = 2'-O-methoxyethyl 5-methylcytidine
  modified_base 5: mod_base = OTHER; note = 2'-O-methoxyethyl adenosine
  modified_base 6: mod_base = OTHER; note = 2'-O-methoxyethyl adenosine
  modified_base 7: mod_base = OTHER; note = 2'-O-methoxyethyl 5-methylcytidine
  modified_base 8: mod_base = OTHER; note = 2'-O-methoxyethyl adenosine
  modified_base 9: mod_base = OTHER; note = 2'-O-methoxyethyl adenosine
  modified_base 10: mod_base = OTHER; note = 2'-O-methoxyethyl adenosine
  modified_base 11: mod_base = OTHER; note = 2'-O-methoxyethyl guanosine
  modified_base 12: mod_base = OTHER; note = 2'-O-methoxyethyl 5-methylcytidine
  modified_base 13: mod_base = OTHER; note = 2'-O-methoxyethyl adenosine
  modified_base 14: mod_base = OTHER; note = 2'-O-methoxyethyl guanosine
  modified_base 15: mod_base = OTHER; note = 2'-O-methoxyethyl adenosine
  modified_base 23: mod_base = OTHER; note = 2'-deoxy 5-methylcytidine
  modified_base 26: mod_base = OTHER; note = 2'-O-methoxyethyl adenosine
  modified_base 27: mod_base = OTHER; note = 2'-O-methoxyethyl guanosine
  modified_base 28: mod_base = OTHER; note = 2'-O-methoxyethyl thymidine
  modified_base 29: mod_base = OTHER; note = 2'-O-methoxyethyl guanosine
  modified_base 30: mod_base = OTHER; note = 2'-O-methoxyethyl 5-methylcytidine
  misc_feature 1..15: note = RNA
  misc_feature 16..25: note = DNA
  misc_feature 26..30: note = RNA
aaacaacaaagcagaggtgaagcgaagtgc

SEQ ID NO: 189 - DNA, 26 bp, synthetic construct
  source 1..26: mol_type = other DNA
  modified_base 1: mod_base = OTHER; note = 2'-O-methoxyethyl 5-methylcytidine
  modified_base 2: mod_base = OTHER; note = 2'-O-methoxyethyl guanosine
  modified_base 3: mod_base = OTHER; note = 2'-O-methoxyethyl thymidine
  modified_base 4: mod_base = OTHER; note = 2'-O-methoxyethyl guanosine
  modified_base 5: mod_base = OTHER; note = 2'-O-methoxyethyl 5-methylcytidine
  modified_base 6: mod_base = OTHER; note = 2'-O-methoxyethyl adenosine
  modified_base 7: mod_base = OTHER; note = 2'-O-methoxyethyl guanosine
  modified_base 8: mod_base = OTHER; note = 2'-O-methoxyethyl adenosine
  modified_base 16: mod_base = OTHER; note = 2'-deoxy 5-methylcytidine
  modified_base 19: mod_base = OTHER; note = 2'-O-methoxyethyl adenosine
  modified_base 20: mod_base = OTHER; note = 2'-O-methoxyethyl guanosine
  modified_base 21: mod_base = OTHER; note = 2'-O-methoxyethyl thymidine
  modified_base 22: mod_base = OTHER; note = 2'-O-methoxyethyl guanosine
  modified_base 23: mod_base = OTHER; note = 2'-O-methoxyethyl 5-methylcytidine
  modified_base 24: mod_base = OTHER; note = 2'-O-methoxyethyl adenosine
  modified_base 25: mod_base = OTHER; note = 2'-O-methoxyethyl 5-methylcytidine
  modified_base 26: mod_base = OTHER; note = 2'-O-methoxyethyl adenosine
  misc_feature 1..8: note = RNA
  misc_feature 9..18: note = DNA
  misc_feature 19..26: note = RNA
cgtgcagaggtgaagcgaagtgcaca

SEQ ID NO: 190 - DNA, 24 bp, synthetic construct
  source 1..24: mol_type = other DNA
  modified_base 1: mod_base = OTHER; note = 2'-O-methoxyethyl guanosine
  modified_base 2: mod_base = OTHER; note = 2'-O-methoxyethyl thymidine
  modified_base 3: mod_base = OTHER; note = 2'-O-methoxyethyl guanosine
  modified_base 4: mod_base = OTHER; note = 2'-O-methoxyethyl 5-methylcytidine
  modified_base 5: mod_base = OTHER; note = 2'-O-methoxyethyl adenosine
  modified_base 6: mod_base = OTHER; note = 2'-O-methoxyethyl guanosine
  modified_base 7: mod_base = OTHER; note = 2'-O-methoxyethyl adenosine
  modified_base 15: mod_base = OTHER; note = 2'-deoxy 5-methylcytidine
  modified_base 18: mod_base = OTHER; note = 2'-O-methoxyethyl adenosine
  modified_base 19: mod_base = OTHER; note = 2'-O-methoxyethyl guanosine
  modified_base 20: mod_base = OTHER; note = 2'-O-methoxyethyl thymidine
  modified_base 21: mod_base = OTHER; note = 2'-O-methoxyethyl guanosine
  modified_base 22: mod_base = OTHER; note = 2'-O-methoxyethyl 5-methylcytidine
  modified_base 23: mod_base = OTHER; note = 2'-O-methoxyethyl adenosine
  modified_base 24: mod_base = OTHER; note = 2'-O-methoxyethyl 5-methylcytidine
  misc_feature 1..7: note = RNA
  misc_feature 8..17: note = DNA
  misc_feature 18..24: note = RNA
gtgcagaggtgaagcgaagtgcac

SEQ ID NO: 191 - DNA, 22 bp, synthetic construct
  source 1..22: mol_type = other DNA
  modified_base 1: mod_base = OTHER; note = 2'-O-methoxyethyl thymidine
  modified_base 2: mod_base = OTHER; note = 2'-O-methoxyethyl guanosine
  modified_base 3: mod_base = OTHER; note = 2'-O-methoxyethyl 5-methylcytidine
  modified_base 4: mod_base = OTHER; note = 2'-O-methoxyethyl adenosine
  modified_base 5: mod_base = OTHER; note = 2'-O-methoxyethyl guanosine
  modified_base 6: mod_base = OTHER; note = 2'-O-methoxyethyl adenosine
  modified_base 14: mod_base = OTHER; note = 2'-deoxy 5-methylcytidine
  modified_base 17: mod_base = OTHER; note = 2'-O-methoxyethyl adenosine
  modified_base 18: mod_base = OTHER; note = 2'-O-methoxyethyl guanosine
  modified_base 19: mod_base = OTHER; note = 2'-O-methoxyethyl thymidine
  modified_base 20: mod_base = OTHER; note = 2'-O-methoxyethyl guanosine
  modified_base 21: mod_base = OTHER; note = 2'-O-methoxyethyl 5-methylcytidine
  modified_base 22: mod_base = OTHER; note = 2'-O-methoxyethyl adenosine
  misc_feature 1..6: note = RNA
  misc_feature 7..16: note = DNA
  misc_feature 17..22: note = RNA
tgcagaggtgaagcgaagtgca

SEQ ID NO: 192 - DNA, 18 bp, synthetic construct
  source 1..18: mol_type = other DNA
  modified_base 1: mod_base = OTHER; note = 2'-O-methoxyethyl 5-methylcytidine
  modified_base 2: mod_base = OTHER; note = 2'-O-methoxyethyl adenosine
  modified_base 3: mod_base = OTHER; note = 2'-O-methoxyethyl guanosine
  modified_base 4: mod_base = OTHER; note = 2'-O-methoxyethyl adenosine
  modified_base 12: mod_base = OTHER; note = 2'-deoxy 5-methylcytidine
  modified_base 15: mod_base = OTHER; note = 2'-O-methoxyethyl adenosine
  modified_base 16: mod_base = OTHER; note = 2'-O-methoxyethyl guanosine
  modified_base 17: mod_base = OTHER; note = 2'-O-methoxyethyl thymidine
  modified_base 18: mod_base = OTHER; note = 2'-O-methoxyethyl guanosine
  misc_feature 1..4: note = RNA
  misc_feature 5..14: note = DNA
  misc_feature 15..18: note = RNA
cagaggtgaagcgaagtg

SEQ ID NO: 193 - DNA, 16 bp, synthetic construct
  source 1..16: mol_type = other DNA
  modified_base 1: mod_base = OTHER; note = 2'-O-methoxyethyl adenosine
  modified_base 2: mod_base = OTHER; note = 2'-O-methoxyethyl guanosine
  modified_base 3: mod_base = OTHER; note = 2'-O-methoxyethyl adenosine
  modified_base 11: mod_base = OTHER; note = 2'-deoxy 5-methylcytidine
  modified_base 14: mod_base = OTHER; note = 2'-O-methoxyethyl adenosine
  modified_base 15: mod_base = OTHER; note = 2'-O-methoxyethyl guanosine
  modified_base 16: mod_base = OTHER; note = 2'-O-methoxyethyl thymidine
  misc_feature 1..3: note = RNA
  misc_feature 4..13: note = DNA
  misc_feature 14..16: note = RNA
agaggtgaagcgaagt

SEQ ID NO: 194 - DNA, 14 bp, synthetic construct
  source 1..14: mol_type = other DNA
  modified_base 1: mod_base = OTHER; note = 2'-O-methoxyethyl guanosine
  modified_base 2: mod_base = OTHER; note = 2'-O-methoxyethyl adenosine
  modified_base 10: mod_base = OTHER; note = 2'-deoxy 5-methylcytidine
  modified_base 13: mod_base = OTHER; note = 2'-O-methoxyethyl adenosine
  modified_base 14: mod_base = OTHER; note = 2'-O-methoxyethyl guanosine
  misc_feature 1..2: note = RNA
  misc_feature 3..12: note = DNA
  misc_feature 13..14: note = RNA
gaggtgaagcgaag

SEQ ID NO: 195 - DNA, 25 bp, synthetic construct
  source 1..25: mol_type = other DNA
  modified_base 1: mod_base = OTHER; note = 2'-O-methoxyethyl guanosine
  modified_base 2: mod_base = OTHER; note = 2'-O-methoxyethyl 5-methylcytidine
  modified_base 3: mod_base = OTHER; note = 2'-O-methoxyethyl adenosine
  modified_base 4: mod_base = OTHER; note = 2'-O-methoxyethyl guanosine
  modified_base 5: mod_base = OTHER; note = 2'-O-methoxyethyl adenosine
  modified_base 13: mod_base = OTHER; note = 2'-deoxy 5-methylcytidine
  modified_base 16: mod_base = OTHER; note = 2'-O-methoxyethyl adenosine
  modified_base 17: mod_base = OTHER; note = 2'-O-methoxyethyl guanosine
  modified_base 18: mod_base = OTHER; note = 2'-O-methoxyethyl thymidine
  modified_base 19: mod_base = OTHER; note = 2'-O-methoxyethyl guanosine
  modified_base 20: mod_base = OTHER; note = 2'-O-methoxyethyl 5-methylcytidine
  modified_base 21: mod_base = OTHER; note = 2'-O-methoxyethyl adenosine
  modified_base 22: mod_base = OTHER; note = 2'-O-methoxyethyl adenosine
  modified_base 23: mod_base = OTHER; note = 2'-O-methoxyethyl 5-methylcytidine
  modified_base 24: mod_base = OTHER; note = 2'-O-methoxyethyl adenosine
  modified_base 25: mod_base = OTHER; note = 2'-O-methoxyethyl 5-methylcytidine
  misc_feature 1..5: note = RNA
  misc_feature 6..15: note = DNA
  misc_feature 16..25: note = RNA
gcagaggtgaagcgaagtgcaacac

SEQ ID NO: 196 - DNA, 30 bp, synthetic construct
  source 1..30: mol_type = other DNA
  modified_base 1: mod_base = OTHER; note = 2'-O-methoxyethyl guanosine
  modified_base 2: mod_base = OTHER; note = 2'-O-methoxyethyl 5-methylcytidine
  modified_base 3: mod_base = OTHER; note = 2'-O-methoxyethyl adenosine
  modified_base 4: mod_base = OTHER; note = 2'-O-methoxyethyl guanosine
  modified_base 5: mod_base = OTHER; note = 2'-O-methoxyethyl adenosine
  modified_base 13: mod_base = OTHER; note = 2'-deoxy 5-methylcytidine
  modified_base 16: mod_base = OTHER; note = 2'-O-methoxyethyl adenosine
  modified_base 17: mod_base = OTHER; note = 2'-O-methoxyethyl guanosine
  modified_base 18: mod_base = OTHER; note = 2'-O-methoxyethyl thymidine
  modified_base 19: mod_base = OTHER; note = 2'-O-methoxyethyl guanosine
  modified_base 20: mod_base = OTHER; note = 2'-O-methoxyethyl 5-methylcytidine
  modified_base 21: mod_base = OTHER; note = 2'-O-methoxyethyl adenosine
  modified_base 22: mod_base = OTHER; note = 2'-O-methoxyethyl adenosine
  modified_base 23: mod_base = OTHER; note = 2'-O-methoxyethyl 5-methylcytidine
  modified_base 24: mod_base = OTHER; note = 2'-O-methoxyethyl adenosine
  modified_base 25: mod_base = OTHER; note = 2'-O-methoxyethyl 5-methylcytidine
  modified_base 26: mod_base = OTHER; note = 2'-O-methoxyethyl adenosine
  modified_base 27: mod_base = OTHER; note = 2'-O-methoxyethyl adenosine
  modified_base 28: mod_base = OTHER; note = 2'-O-methoxyethyl 5-methylcytidine
  modified_base 29: mod_base = OTHER; note = 2'-O-methoxyethyl adenosine
  modified_base 30: mod_base = OTHER; note = 2'-O-methoxyethyl 5-methylcytidine
  misc_feature 1..5: note = RNA
  misc_feature 6..15: note = DNA
  misc_feature 16..30: note = RNA
gcagaggtgaagcgaagtgcaacacaacac

SEQ ID NO: 197 - DNA, 35 bp, synthetic construct
  source 1..35: mol_type = other DNA
  modified_base 1: mod_base = OTHER; note = 2'-O-methoxyethyl guanosine
  modified_base 2: mod_base = OTHER; note = 2'-O-methoxyethyl 5-methylcytidine
  modified_base 3: mod_base = OTHER; note = 2'-O-methoxyethyl adenosine
  modified_base 4: mod_base = OTHER; note = 2'-O-methoxyethyl guanosine
  modified_base 5: mod_base = OTHER; note = 2'-O-methoxyethyl adenosine
  modified_base 13: mod_base = OTHER; note = 2'-deoxy 5-methylcytidine
  modified_base 16: mod_base = OTHER; note = 2'-O-methoxyethyl adenosine
  modified_base 17: mod_base = OTHER; note = 2'-O-methoxyethyl guanosine
  modified_base 18: mod_base = OTHER; note = 2'-O-methoxyethyl thymidine
  modified_base 19: mod_base = OTHER; note = 2'-O-methoxyethyl guanosine
  modified_base 20: mod_base = OTHER; note = 2'-O-methoxyethyl 5-methylcytidine
  modified_base 21: mod_base = OTHER; note = 2'-O-methoxyethyl adenosine
  modified_base 22: mod_base = OTHER; note = 2'-O-methoxyethyl adenosine
  modified_base 23: mod_base = OTHER; note = 2'-O-methoxyethyl 5-methylcytidine
  modified_base 24: mod_base = OTHER; note = 2'-O-methoxyethyl adenosine
  modified_base 25: mod_base = OTHER; note = 2'-O-methoxyethyl 5-methylcytidine
  modified_base 26: mod_base = OTHER; note = 2'-O-methoxyethyl adenosine
  modified_base 27: mod_base = OTHER; note = 2'-O-methoxyethyl adenosine
  modified_base 28: mod_base = OTHER; note = 2'-O-methoxyethyl 5-methylcytidine
  modified_base 29: mod_base = OTHER; note = 2'-O-methoxyethyl adenosine
  modified_base 30: mod_base = OTHER; note = 2'-O-methoxyethyl 5-methylcytidine
  modified_base 31: mod_base = OTHER; note = 2'-O-methoxyethyl adenosine
  modified_base 32: mod_base = OTHER; note = 2'-O-methoxyethyl adenosine
  modified_base 33: mod_base = OTHER; note = 2'-O-methoxyethyl 5-methylcytidine
  modified_base 34: mod_base = OTHER; note = 2'-O-methoxyethyl adenosine
  modified_base 35: mod_base = OTHER; note = 2'-O-methoxyethyl 5-methylcytidine
  misc_feature 1..5: note = RNA
  misc_feature 6..15: note = DNA
  misc_feature 16..35: note = RNA
gcagaggtgaagcgaagtgcaacacaacacaacac

SEQ ID NO: 198 - DNA, 40 bp, synthetic construct; identical to SEQ ID NO: 69
  source 1..40: mol_type = other DNA
  modified_base 1: mod_base = OTHER; note = 2'-O-methoxyethyl guanosine
  modified_base 2: mod_base = OTHER; note = 2'-O-methoxyethyl 5-methylcytidine
  modified_base 3: mod_base = OTHER; note = 2'-O-methoxyethyl adenosine
  modified_base 4: mod_base = OTHER; note = 2'-O-methoxyethyl guanosine
  modified_base 5: mod_base = OTHER; note = 2'-O-methoxyethyl adenosine
  modified_base 13: mod_base = OTHER; note = 2'-deoxy 5-methylcytidine
  modified_base 16: mod_base = OTHER; note = 2'-O-methoxyethyl adenosine
  modified_base 17: mod_base = OTHER; note = 2'-O-methoxyethyl guanosine
  modified_base 18: mod_base = OTHER; note = 2'-O-methoxyethyl thymidine
  modified_base 19: mod_base = OTHER; note = 2'-O-methoxyethyl guanosine
  modified_base 20: mod_base = OTHER; note = 2'-O-methoxyethyl 5-methylcytidine
  modified_base 21: mod_base = OTHER; note = 2'-O-methoxyethyl adenosine
  modified_base 22: mod_base = OTHER; note = 2'-O-methoxyethyl adenosine
  modified_base 23: mod_base = OTHER; note = 2'-O-methoxyethyl 5-methylcytidine
  modified_base 24: mod_base = OTHER; note = 2'-O-methoxyethyl adenosine
  modified_base 25: mod_base = OTHER; note = 2'-O-methoxyethyl 5-methylcytidine
  modified_base 26: mod_base = OTHER; note = 2'-O-methoxyethyl adenosine
  modified_base 27: mod_base = OTHER; note = 2'-O-methoxyethyl adenosine
  modified_base 28: mod_base = OTHER; note = 2'-O-methoxyethyl 5-methylcytidine
  modified_base 29: mod_base = OTHER; note = 2'-O-methoxyethyl adenosine
  modified_base 30: mod_base = OTHER; note = 2'-O-methoxyethyl 5-methylcytidine
  modified_base 31: mod_base = OTHER; note = 2'-O-methoxyethyl adenosine
  modified_base 32: mod_base = OTHER; note = 2'-O-methoxyethyl adenosine
  modified_base 33: mod_base = OTHER; note = 2'-O-methoxyethyl 5-methylcytidine
  modified_base 34: mod_base = OTHER; note = 2'-O-methoxyethyl adenosine
  modified_base 35: mod_base = OTHER; note = 2'-O-methoxyethyl 5-methylcytidine
  modified_base 36: mod_base = OTHER; note = 2'-O-methoxyethyl adenosine
  modified_base 37: mod_base = OTHER; note = 2'-O-methoxyethyl adenosine
  modified_base 38: mod_base = OTHER; note = 2'-O-methoxyethyl 5-methylcytidine
  modified_base 39: mod_base = OTHER; note = 2'-O-methoxyethyl adenosine
  modified_base 40: mod_base = OTHER; note = 2'-O-methoxyethyl 5-methylcytidine
  misc_feature 1..5: note = RNA
  misc_feature 6..15: note = DNA
  misc_feature 16..40: note = RNA

SEQ ID NO: 199 - DNA, 45 bp, synthetic construct
  source 1..45: mol_type = other DNA
  modified_base 1: mod_base = OTHER; note = 2'-O-methoxyethyl guanosine
  modified_base 2: mod_base = OTHER; note = 2'-O-methoxyethyl 5-methylcytidine
  modified_base 3: mod_base = OTHER; note = 2'-O-methoxyethyl adenosine
  modified_base 4: mod_base = OTHER; note = 2'-O-methoxyethyl guanosine
  modified_base 5: mod_base = OTHER; note = 2'-O-methoxyethyl adenosine
  modified_base 13: mod_base = OTHER; note = 2'-deoxy 5-methylcytidine
  modified_base 16: mod_base = OTHER; note = 2'-O-methoxyethyl adenosine
  modified_base 17: mod_base = OTHER; note = 2'-O-methoxyethyl guanosine
  modified_base 18: mod_base = OTHER; note = 2'-O-methoxyethyl thymidine
  modified_base 19: mod_base = OTHER; note = 2'-O-methoxyethyl guanosine
  modified_base 20: mod_base = OTHER; note = 2'-O-methoxyethyl 5-methylcytidine
  modified_base 21: mod_base = OTHER; note = 2'-O-methoxyethyl adenosine
  modified_base 22: mod_base = OTHER; note = 2'-O-methoxyethyl adenosine
  modified_base 23: mod_base = OTHER; note = 2'-O-methoxyethyl 5-methylcytidine
  modified_base 24: mod_base = OTHER; note = 2'-O-methoxyethyl adenosine
  modified_base 25: mod_base = OTHER; note = 2'-O-methoxyethyl 5-methylcytidine
  modified_base 26: mod_base = OTHER; note = 2'-O-methoxyethyl adenosine
  modified_base 27: mod_base = OTHER; note = 2'-O-methoxyethyl adenosine
  modified_base 28: mod_base = OTHER; note = 2'-O-methoxyethyl 5-methylcytidine
  modified_base 29: mod_base = OTHER; note = 2'-O-methoxyethyl adenosine
  modified_base 30: mod_base = OTHER; note = 2'-O-methoxyethyl 5-methylcytidine
  modified_base 31: mod_base = OTHER; note = 2'-O-methoxyethyl adenosine
  modified_base 32: mod_base = OTHER; note = 2'-O-methoxyethyl adenosine
  modified_base 33: mod_base = OTHER; note = 2'-O-methoxyethyl 5-methylcytidine
  modified_base 34: mod_base = OTHER; note = 2'-O-methoxyethyl adenosine
  modified_base 35: mod_base = OTHER; note = 2'-O-methoxyethyl 5-methylcytidine
  modified_base 36: mod_base = OTHER; note = 2'-O-methoxyethyl adenosine
  modified_base 37: mod_base = OTHER; note = 2'-O-methoxyethyl adenosine
  modified_base 38: mod_base = OTHER; note = 2'-O-methoxyethyl 5-methylcytidine
  modified_base 39: mod_base = OTHER; note = 2'-O-methoxyethyl adenosine
  modified_base 40: mod_base = OTHER; note = 2'-O-methoxyethyl 5-methylcytidine
  modified_base 41: mod_base = OTHER; note = 2'-O-methoxyethyl adenosine
  modified_base 42: mod_base = OTHER; note = 2'-O-methoxyethyl adenosine
  modified_base 43: mod_base = OTHER; note = 2'-O-methoxyethyl 5-methylcytidine
  modified_base 44: mod_base = OTHER; note = 2'-O-methoxyethyl adenosine
  modified_base 45: mod_base = OTHER; note = 2'-O-methoxyethyl 5-methylcytidine
  misc_feature 1..5: note = RNA
  misc_feature 6..15: note = DNA
  misc_feature 16..45: note = RNA
gcagaggtgaagcgaagtgcaacacaacacaacacaacacaacac

SEQ ID NO: 200 - DNA, 50 bp, synthetic construct
  source 1..50: mol_type = other DNA
  modified_base 1: mod_base = OTHER; note = 2'-O-methoxyethyl guanosine
  modified_base 2: mod_base = OTHER; note = 2'-O-methoxyethyl 5-methylcytidine
  modified_base 3: mod_base = OTHER; note = 2'-O-methoxyethyl adenosine
  modified_base 4: mod_base = OTHER; note = 2'-O-methoxyethyl guanosine
  modified_base 5: mod_base = OTHER; note = 2'-O-methoxyethyl adenosine
  modified_base 13: mod_base = OTHER; note = 2'-deoxy 5-methylcytidine
  modified_base 16: mod_base = OTHER; note = 2'-O-methoxyethyl adenosine
  modified_base 17: mod_base = OTHER; note = 2'-O-methoxyethyl guanosine
  modified_base 18: mod_base = OTHER; note = 2'-O-methoxyethyl thymidine
  modified_base 19: mod_base = OTHER; note = 2'-O-methoxyethyl guanosine
  modified_base 20: mod_base = OTHER; note = 2'-O-methoxyethyl 5-methylcytidine
  modified_base 21: mod_base = OTHER; note = 2'-O-methoxyethyl adenosine
  modified_base 22: mod_base = OTHER; note = 2'-O-methoxyethyl adenosine
  modified_base 23: mod_base = OTHER; note = 2'-O-methoxyethyl 5-methylcytidine
  modified_base 24: mod_base = OTHER; note = 2'-O-methoxyethyl adenosine
  modified_base 25: mod_base = OTHER; note = 2'-O-methoxyethyl 5-methylcytidine
  modified_base 26: mod_base = OTHER; note = 2'-O-methoxyethyl adenosine
  modified_base 27: mod_base = OTHER; note = 2'-O-methoxyethyl adenosine
  modified_base 28: mod_base = OTHER; note = 2'-O-methoxyethyl 5-methylcytidine
  modified_base 29: mod_base = OTHER; note = 2'-O-methoxyethyl adenosine
  modified_base 30: mod_base = OTHER; note = 2'-O-methoxyethyl 5-methylcytidine
  modified_base 31: mod_base = OTHER; note = 2'-O-methoxyethyl adenosine
  modified_base 32: mod_base = OTHER; note = 2'-O-methoxyethyl adenosine
  modified_base 33: mod_base = OTHER; note = 2'-O-methoxyethyl 5-methylcytidine
  modified_base 34: mod_base = OTHER; note = 2'-O-methoxyethyl adenosine
  modified_base 35: mod_base = OTHER; note = 2'-O-methoxyethyl 5-methylcytidine
  modified_base 36: mod_base = OTHER; note = 2'-O-methoxyethyl adenosine
  modified_base 37: mod_base = OTHER; note = 2'-O-methoxyethyl adenosine
  modified_base 38: mod_base = OTHER; note = 2'-O-methoxyethyl 5-methylcytidine
  modified_base 39: mod_base = OTHER; note = 2'-O-methoxyethyl adenosine
  modified_base 40: mod_base = OTHER; note = 2'-O-methoxyethyl 5-methylcytidine
  modified_base 41: mod_base = OTHER; note = 2'-O-methoxyethyl adenosine
  modified_base 42: mod_base = OTHER; note = 2'-O-methoxyethyl adenosine
  modified_base 43: mod_base = OTHER; note = 2'-O-methoxyethyl 5-methylcytidine
  modified_base 44: mod_base = OTHER; note = 2'-O-methoxyethyl adenosine
  modified_base 45: mod_base = OTHER; note = 2'-O-methoxyethyl 5-methylcytidine
  modified_base 46: mod_base = OTHER; note = 2'-O-methoxyethyl adenosine
  modified_base 47: mod_base = OTHER; note = 2'-O-methoxyethyl adenosine
  modified_base 48: mod_base = OTHER; note = 2'-O-methoxyethyl 5-methylcytidine
  modified_base 49: mod_base = OTHER; note = 2'-O-methoxyethyl adenosine
  modified_base 50: mod_base = OTHER; note = 2'-O-methoxyethyl 5-methylcytidine
  misc_feature 1..5: note = RNA
  misc_feature 6..15: note = DNA
  misc_feature 16..50: note = RNA
gcagaggtgaagcgaagtgcaacacaacacaacacaacacaacacaacac

SEQ ID NO: 201 - DNA, 40 bp, synthetic construct; identical to SEQ ID NO: 12
  source 1..40: mol_type = other DNA
  modified_base 1: mod_base = OTHER; note = 2'-O-methoxyethyl guanosine
  modified_base 2: mod_base = OTHER; note = 2'-O-methoxyethyl 5-methylcytidine
  modified_base 3: mod_base = OTHER; note = 2'-O-methoxyethyl adenosine
  modified_base 4: mod_base = OTHER; note = 2'-O-methoxyethyl guanosine
  modified_base 5: mod_base = OTHER; note = 2'-O-methoxyethyl adenosine
  modified_base 13: mod_base = OTHER; note = 2'-deoxy 5-methylcytidine
  modified_base 16: mod_base = OTHER; note = 2'-O-methoxyethyl adenosine
  modified_base 17: mod_base = OTHER; note = 2'-O-methoxyethyl guanosine
  modified_base 18: mod_base = OTHER; note = 2'-O-methoxyethyl thymidine
  modified_base 19: mod_base = OTHER; note = 2'-O-methoxyethyl guanosine
  modified_base 20: mod_base = OTHER; note = 2'-O-methoxyethyl 5-methylcytidine
  modified_base 21: mod_base = OTHER; note = 2'-O-methoxyethyl adenosine
  modified_base 22: mod_base = OTHER; note = 2'-O-methoxyethyl adenosine
  modified_base 23: mod_base = OTHER; note = 2'-O-methoxyethyl adenosine
  modified_base 24: mod_base = OTHER; note = 2'-O-methoxyethyl 5-methylcytidine
  modified_base 25: mod_base = OTHER; note = 2'-O-methoxyethyl adenosine
  modified_base 26: mod_base = OTHER; note = 2'-O-methoxyethyl adenosine
  modified_base 27: mod_base = OTHER; note = 2'-O-methoxyethyl 5-methylcytidine
  modified_base 28: mod_base = OTHER; note = 2'-O-methoxyethyl adenosine
  modified_base 29: mod_base = OTHER; note = 2'-O-methoxyethyl adenosine
  modified_base 30: mod_base = OTHER; note = 2'-O-methoxyethyl adenosine
  modified_base 31: mod_base = OTHER; note = 2'-O-methoxyethyl 5-methylcytidine
  modified_base 32: mod_base = OTHER; note = 2'-O-methoxyethyl adenosine
  modified_base 33: mod_base = OTHER; note = 2'-O-methoxyethyl adenosine
  modified_base 34: mod_base = OTHER; note = 2'-O-methoxyethyl 5-methylcytidine
  modified_base 35: mod_base = OTHER; note = 2'-O-methoxyethyl adenosine
  modified_base 36: mod_base = OTHER; note = 2'-O-methoxyethyl adenosine
  modified_base 37: mod_base = OTHER; note = 2'-O-methoxyethyl adenosine
  modified_base 38: mod_base = OTHER; note = 2'-O-methoxyethyl 5-methylcytidine
  modified_base 39: mod_base = OTHER; note = 2'-O-methoxyethyl adenosine
  modified_base 40: mod_base = OTHER; note = 2'-O-methoxyethyl adenosine
  misc_feature 1..5: note = RNA
  misc_feature 6..15: note = DNA
  misc_feature 16..40: note = RNA

SEQ ID NO: 202 - DNA, 40 bp, synthetic construct
  source 1..40: mol_type = other DNA
  modified_base 1: mod_base = OTHER; note = 2'-O-methoxyethyl guanosine
  modified_base 2: mod_base = OTHER; note = 2'-O-methoxyethyl 5-methylcytidine
  modified_base 3: mod_base = OTHER; note = 2'-O-methoxyethyl adenosine
  modified_base 4: mod_base = OTHER; note = 2'-O-methoxyethyl guanosine
  modified_base 5: mod_base = OTHER; note = 2'-O-methoxyethyl adenosine
  modified_base 13: mod_base = OTHER; note = 2'-deoxy 5-methylcytidine
  modified_base 16: mod_base = OTHER; note = 2'-O-methoxyethyl adenosine
  modified_base 17: mod_base = OTHER; note = 2'-O-methoxyethyl guanosine
  modified_base 18: mod_base = OTHER; note = 2'-O-methoxyethyl thymidine
  modified_base 19: mod_base = OTHER; note = 2'-O-methoxyethyl guanosine
  modified_base 20: mod_base = OTHER; note = 2'-O-methoxyethyl 5-methylcytidine
  modified_base 21: mod_base = OTHER; note = 2'-O-methoxyethyl adenosine
  modified_base 22: mod_base = OTHER; note = 2'-O-methoxyethyl 5-methylcytidine
  modified_base 23: mod_base = OTHER; note = 2'-O-methoxyethyl adenosine
  modified_base 24: mod_base = OTHER; note = 2'-O-methoxyethyl 5-methylcytidine
  modified_base 25: mod_base = OTHER; note = 2'-O-methoxyethyl adenosine
  modified_base 26: mod_base = OTHER; note = 2'-O-methoxyethyl 5-methylcytidine
  modified_base 27: mod_base = OTHER; note = 2'-O-methoxyethyl adenosine
  modified_base 28: mod_base = OTHER; note = 2'-O-methoxyethyl 5-methylcytidine
  modified_base 29: mod_base = OTHER; note = 2'-O-methoxyethyl adenosine
  modified_base 30: mod_base = OTHER; note = 2'-O-methoxyethyl 5-methylcytidine
  modified_base 31: mod_base = OTHER; note = 2'-O-methoxyethyl adenosine
  modified_base 32: mod_base = OTHER; note = 2'-O-methoxyethyl 5-methylcytidine
  modified_base 33: mod_base = OTHER; note = 2'-O-methoxyethyl adenosine
  modified_base 34: mod_base = OTHER; note = 2'-O-methoxyethyl 5-methylcytidine
  modified_base 35: mod_base = OTHER; note = 2'-O-methoxyethyl adenosine
  modified_base 36: mod_base = OTHER; note = 2'-O-methoxyethyl 5-methylcytidine
  modified_base 37: mod_base = OTHER; note = 2'-O-methoxyethyl adenosine
  modified_base 38: mod_base = OTHER; note = 2'-O-methoxyethyl 5-methylcytidine
  modified_base 39: mod_base = OTHER; note = 2'-O-methoxyethyl adenosine
  modified_base 40: mod_base = OTHER; note = 2'-O-methoxyethyl 5-methylcytidine
  misc_feature 1..5: note = RNA
  misc_feature 6..15: note = DNA
  misc_feature 16..40: note = RNA
gcagaggtgaagcgaagtgcacacacacacacacacacac

SEQ ID NO: 203 - DNA, 40 bp, synthetic construct; identical to SEQ ID NO: 69
  source 1..40: mol_type = other DNA
  modified_base 1: mod_base = OTHER; note = 2'-O-methoxyethyl guanosine
  modified_base 2: mod_base = OTHER; note = 2'-O-methoxyethyl 5-methylcytidine
  modified_base 3: mod_base = OTHER; note = 2'-O-methoxyethyl adenosine
  modified_base 4: mod_base = OTHER; note = 2'-O-methoxyethyl guanosine
  modified_base 5: mod_base = OTHER; note = 2'-O-methoxyethyl adenosine
  modified_base 13: mod_base = OTHER; note = 2'-deoxy 5-methylcytidine
  modified_base 16: mod_base = OTHER; note = 2'-O-methoxyethyl adenosine
  modified_base 17: mod_base = OTHER; note = 2'-O-methoxyethyl guanosine
  modified_base 18: mod_base = OTHER; note = 2'-O-methoxyethyl thymidine
  modified_base 19: mod_base = OTHER; note = 2'-O-methoxyethyl guanosine
  modified_base 20: mod_base = OTHER; note = 2'-O-methoxyethyl 5-methylcytidine
  modified_base 21: mod_base = OTHER; note = 2'-O-methoxyethyl adenosine
  modified_base 22: mod_base = OTHER; note = 2'-O-methoxyethyl adenosine
  modified_base 23: mod_base = OTHER; note = 2'-O-methoxyethyl 5-methylcytidine
  modified_base 24: mod_base = OTHER; note = 2'-O-methoxyethyl adenosine
  modified_base 25: mod_base = OTHER; note = 2'-O-methoxyethyl 5-methylcytidine
  modified_base 26: mod_base = OTHER; note = 2'-O-methoxyethyl adenosine
  modified_base 27: mod_base = OTHER; note = 2'-O-methoxyethyl adenosine
  modified_base 28: mod_base = OTHER; note = 2'-O-methoxyethyl 5-methylcytidine
  modified_base 29: mod_base = OTHER; note = 2'-O-methoxyethyl adenosine
  modified_base 30: mod_base = OTHER; note = 2'-O-methoxyethyl 5-methylcytidine
  modified_base 31: mod_base = OTHER; note = 2'-O-methoxyethyl adenosine
  modified_base 32: mod_base = OTHER; note = 2'-O-methoxyethyl adenosine
  modified_base 33: mod_base = OTHER; note = 2'-O-methoxyethyl 5-methylcytidine
  modified_base 34: mod_base = OTHER; note = 2'-O-methoxyethyl adenosine
  modified_base 35: mod_base = OTHER; note = 2'-O-methoxyethyl 5-methylcytidine
  modified_base 36: mod_base = OTHER; note = 2'-O-methoxyethyl adenosine
  modified_base 37: mod_base = OTHER; note = 2'-O-methoxyethyl adenosine
  modified_base 38: mod_base = OTHER; note = 2'-O-methoxyethyl 5-methylcytidine
  modified_base 39: mod_base = OTHER; note = 2'-O-methoxyethyl adenosine
  modified_base 40: mod_base = OTHER; note = 2'-O-methoxyethyl 5-methylcytidine
  misc_feature 1..5: note = RNA
  misc_feature 6..15: note = DNA
  misc_feature 16..40: note = RNA

SEQ ID NO: 204 - DNA, 40 bp, synthetic construct; identical to SEQ ID NO: 202
  source 1..40: mol_type = other DNA
  modified_base 1: mod_base = OTHER; note = 2'-O-methoxyethyl guanosine
  modified_base 2: mod_base = OTHER; note = 2'-O-methoxyethyl 5-methylcytidine
  modified_base 3: mod_base = OTHER; note = 2'-O-methoxyethyl adenosine
  modified_base 4: mod_base = OTHER; note = 2'-O-methoxyethyl guanosine
  modified_base 5: mod_base = OTHER; note = 2'-O-methoxyethyl adenosine
  modified_base 13: mod_base = OTHER; note = 2'-deoxy 5-methylcytidine
  modified_base 16: mod_base = OTHER; note = 2'-O-methoxyethyl adenosine
  modified_base 17: mod_base = OTHER; note = 2'-O-methoxyethyl guanosine
  modified_base 18: mod_base = OTHER; note = 2'-O-methoxyethyl thymidine
  modified_base 19: mod_base = OTHER; note = 2'-O-methoxyethyl guanosine
  modified_base 20: mod_base = OTHER; note = 2'-O-methoxyethyl 5-methylcytidine
  modified_base 21: mod_base = OTHER; note = 2'-O-methoxyethyl adenosine
  modified_base 22: mod_base = OTHER; note = 2'-O-methoxyethyl 5-methylcytidine
  modified_base 23: mod_base = OTHER; note = 2'-O-methoxyethyl adenosine
  modified_base 24: mod_base = OTHER; note = 2'-O-methoxyethyl 5-methylcytidine
  modified_base 25: mod_base = OTHER; note = 2'-O-methoxyethyl adenosine
  modified_base 26: mod_base = OTHER; note = 2'-O-methoxyethyl 5-methylcytidine
  modified_base 27: mod_base = OTHER; note = 2'-O-methoxyethyl adenosine
  modified_base 28: mod_base = OTHER; note = 2'-O-methoxyethyl 5-methylcytidine
  modified_base 29: mod_base = OTHER; note = 2'-O-methoxyethyl adenosine
  modified_base 30: mod_base = OTHER; note = 2'-O-methoxyethyl 5-methylcytidine
  modified_base 31: mod_base = OTHER; note = 2'-O-methoxyethyl adenosine
  modified_base 32: mod_base = OTHER; note = 2'-O-methoxyethyl 5-methylcytidine
  modified_base 33: mod_base = OTHER; note = 2'-O-methoxyethyl adenosine
  modified_base 34: mod_base = OTHER; note = 2'-O-methoxyethyl 5-methylcytidine
  modified_base 35: mod_base = OTHER; note = 2'-O-methoxyethyl adenosine
  modified_base 36: mod_base = OTHER; note = 2'-O-methoxyethyl 5-methylcytidine
  modified_base 37: mod_base = OTHER; note = 2'-O-methoxyethyl adenosine
  modified_base 38: mod_base = OTHER; note = 2'-O-methoxyethyl 5-methylcytidine
  modified_base 39: mod_base = OTHER; note = 2'-O-methoxyethyl adenosine
  modified_base 40: mod_base = OTHER; note = 2'-O-methoxyethyl 5-methylcytidine
  misc_feature 1..5: note = RNA
  misc_feature 6..15: note = DNA
  misc_feature 16..40: note = RNA

SEQ ID NO: 205 - DNA, 19 bp, synthetic construct
  source 1..19: mol_type = other DNA
  modified_base 1: mod_base = OTHER; note = 2'-O-methoxyethyl guanosine
  modified_base 2: mod_base = OTHER; note = 2'-O-methoxyethyl 5-methylcytidine
  modified_base 3: mod_base = OTHER; note = 2'-O-methoxyethyl adenosine
  modified_base 4: mod_base = OTHER; note = 2'-O-methoxyethyl guanosine
  modified_base 5: mod_base = OTHER; note = 2'-O-methoxyethyl adenosine
  modified_base 10: mod_base = OTHER; note = 2'-O-methoxyethyl adenosine
  modified_base 13: mod_base = OTHER; note = 2'-deoxy 5-methylcytidine
  modified_base 16: mod_base = OTHER; note = 2'-O-methoxyethyl adenosine
  modified_base 17: mod_base = OTHER; note = 2'-O-methoxyethyl guanosine
  modified_base 18: mod_base = OTHER; note = 2'-O-methoxyethyl uridine
  modified_base 19: mod_base = OTHER; note = 2'-O-methoxyethyl guanosine
  misc_feature 1..5: note = RNA
  misc_feature 6..9: note = DNA
  misc_feature 10: note = RNA
  misc_feature 11..15: note = DNA
  misc_feature 16..19: note = RNA
gcagaggtgaagcgaagtg

SEQ ID NO: 206 - DNA, 18 bp, synthetic construct
  source 1..18: mol_type = other DNA
  modified_base 1: mod_base = OTHER; note = 2'-O-methoxyethyl 5-methylcytidine
  modified_base 2: mod_base = OTHER; note = 2'-O-methoxyethyl adenosine
  modified_base 3: mod_base = OTHER; note = 2'-O-methoxyethyl guanosine
  modified_base 4: mod_base = OTHER; note = 2'-O-methoxyethyl adenosine
  modified_base 9: mod_base = OTHER; note = 2'-O-methoxyethyl adenosine
  modified_base 12: mod_base = OTHER; note = 2'-deoxy 5-methylcytidine
  modified_base 15: mod_base = OTHER; note = 2'-O-methoxyethyl adenosine
  modified_base 16: mod_base = OTHER; note = 2'-O-methoxyethyl guanosine
  modified_base 17: mod_base = OTHER; note = 2'-O-methoxyethyl uridine
  modified_base 18: mod_base = OTHER; note = 2'-O-methoxyethyl guanosine
  misc_feature 1..4: note = RNA
  misc_feature 5..8: note = DNA
  misc_feature 9: note = RNA
  misc_feature 10..14: note = DNA
  misc_feature 15..18: note = RNA
cagaggtgaagcgaagtg

SEQ ID NO: 207 - DNA, 17 bp, synthetic construct
  source 1..17: mol_type = other DNA
  modified_base 1: mod_base = OTHER; note = 2'-O-methoxyethyl adenosine
  modified_base 2: mod_base = OTHER; note = 2'-O-methoxyethyl guanosine
  modified_base 3: mod_base = OTHER; note = 2'-O-methoxyethyl adenosine
  modified_base 8: mod_base = OTHER; note = 2'-O-methoxyethyl adenosine
  modified_base 11: mod_base = OTHER; note = 2'-deoxy 5-methylcytidine
  modified_base 14: mod_base = OTHER; note = 2'-O-methoxyethyl adenosine
  modified_base 15: mod_base = OTHER; note = 2'-O-methoxyethyl guanosine
  modified_base 16: mod_base = OTHER; note = 2'-O-methoxyethyl uridine
  modified_base 17: mod_base = OTHER; note = 2'-O-methoxyethyl guanosine
  misc_feature 1..3: note = RNA
  misc_feature 4..7: note = DNA
  misc_feature 8: note = RNA
  misc_feature 9..13: note = DNA
  misc_feature 14..17: note = RNA
agaggtgaagcgaagtg

SEQ ID NO: 208 - DNA, 17 bp, synthetic construct
  source 1..17: mol_type = other DNA
  modified_base 1: mod_base = OTHER; note = 2'-O-methoxyethyl 5-methylcytidine
  modified_base 2: mod_base = OTHER; note = 2'-O-methoxyethyl adenosine
  modified_base 3: mod_base = OTHER; note = 2'-O-methoxyethyl guanosine
  modified_base 4: mod_base = OTHER; note = 2'-O-methoxyethyl adenosine
  modified_base 9: mod_base = OTHER; note = 2'-O-methoxyethyl adenosine
  modified_base 12: mod_base = OTHER; note = 2'-deoxy 5-methylcytidine
  modified_base 15: mod_base = OTHER; note = 2'-O-methoxyethyl adenosine
  modified_base 16: mod_base = OTHER; note = 2'-O-methoxyethyl guanosine
  modified_base 17: mod_base = OTHER; note = 2'-O-methoxyethyl uridine
  misc_feature 1..4: note = RNA
  misc_feature 5..8: note = DNA
  misc_feature 9: note = RNA
  misc_feature 10..14: note = DNA
  misc_feature 15..17: note = RNA
cagaggtgaagcgaagt

SEQ ID NO: 209 - DNA, 16 bp, synthetic construct
  source 1..16: mol_type = other DNA
  modified_base 1: mod_base = OTHER; note = 2'-O-methoxyethyl adenosine
  modified_base 2: mod_base = OTHER; note = 2'-O-methoxyethyl guanosine
  modified_base 3: mod_base = OTHER; note = 2'-O-methoxyethyl adenosine
  modified_base 8: mod_base = OTHER; note = 2'-O-methoxyethyl adenosine
  modified_base 11: mod_base = OTHER; note = 2'-deoxy 5-methylcytidine
  modified_base 14: mod_base = OTHER; note = 2'-O-methoxyethyl adenosine
  modified_base 15: mod_base = OTHER; note = 2'-O-methoxyethyl guanosine
  modified_base 16: mod_base = OTHER; note = 2'-O-methoxyethyl uridine
  misc_feature 1..3: note = RNA
  misc_feature 4..7: note = DNA
  misc_feature 8: note = RNA
  misc_feature 9..13: note = DNA
  misc_feature 14..16: note = RNA
agaggtgaagcgaagt

SEQ ID NO: 210 - DNA, 20 bp, synthetic construct
  source 1..20: mol_type = other DNA
  modified_base 2: mod_base = OTHER; note = 2'-deoxy cytidine
  modified_base 13: mod_base = OTHER; note = 2'-deoxy cytidine
  modified_base 20: mod_base = OTHER; note = 2'-deoxy cytidine
gcagaggtgaagcgaagtgc

SEQ ID NO: 211 - DNA, 20 bp, synthetic construct
  source 1..20: mol_type = other DNA
  modified_base 1: mod_base = OTHER; note = 2'-O-methyl guanosine
  modified_base 2: mod_base = OTHER; note = 2'-O-methyl 5-methylcytidine
  modified_base 3: mod_base = OTHER; note = 2'-O-methyl adenosine
  modified_base 4: mod_base = OTHER; note = 2'-O-methyl guanosine
  modified_base 5: mod_base = OTHER; note = 2'-O-methyl adenosine
  modified_base 13: mod_base = OTHER; note = 2'-deoxy cytidine
  modified_base 16: mod_base = OTHER; note = 2'-O-methyl adenosine
  modified_base 17: mod_base = OTHER; note = 2'-O-methyl guanosine
  modified_base 18: mod_base = OTHER; note = 2'-O-methyl thymidine
  modified_base 19: mod_base = OTHER; note = 2'-O-methyl guanosine
  modified_base 20: mod_base = OTHER; note = 2'-O-methyl 5-methylcytidine
  misc_feature 1..5: note = RNA
  misc_feature 6..15: note = DNA
  misc_feature 16..20: note = RNA
gcagaggtgaagcgaagtgc

SEQ ID NO: 212 - DNA, 20 bp, synthetic construct
  source 1..20: mol_type = other DNA
  modified_base 1: mod_base = OTHER; note = 2'-O-methoxyethyl guanosine
  modified_base 2: mod_base = OTHER; note = 2'-O-methoxyethyl 5-methylcytidine
  modified_base 3: mod_base = OTHER; note = 2'-O-methoxyethyl adenosine
  modified_base 4: mod_base = OTHER; note = 2'-O-methoxyethyl guanosine
  modified_base 5: mod_base = OTHER; note = 2'-O-methoxyethyl adenosine
  modified_base 13: mod_base = OTHER; note = 2'-deoxy 5-methylcytidine
  modified_base 16: mod_base = OTHER; note = 2'-O-methoxyethyl adenosine
  modified_base 17: mod_base = OTHER; note = 2'-O-methoxyethyl guanosine
  modified_base 18: mod_base = OTHER; note = 2'-O-methoxyethyl uridine
  modified_base 19: mod_base = OTHER; note = 2'-O-methoxyethyl guanosine
  modified_base 20: mod_base = OTHER; note = 2'-O-methoxyethyl 5-methylcytidine
  misc_feature 1..5: note = RNA
  misc_feature 6..15: note = DNA
  misc_feature 16..20: note = RNA
gcagaggtgaagcgaagtgc

SEQ ID NO: 213 - DNA, 20 bp, synthetic construct
  source 1..20: mol_type = other DNA
  modified_base 1: mod_base = OTHER; note = 2'-O-methoxyethyl adenosine
  modified_base 2: mod_base = OTHER; note = 2'-O-methoxyethyl adenosine
  modified_base 3: mod_base = OTHER; note = 2'-O-methoxyethyl 5-methylcytidine
  modified_base 4: mod_base = OTHER; note = 2'-O-methoxyethyl adenosine
  modified_base 5: mod_base = OTHER; note = 2'-O-methoxyethyl adenosine
  modified_base 13: mod_base = OTHER; note = 2'-deoxy 5-methylcytidine
  modified_base 16: mod_base = OTHER; note = 2'-O-methoxyethyl adenosine
  modified_base 17: mod_base = OTHER; note = 2'-O-methoxyethyl guanosine
  modified_base 18: mod_base = OTHER; note = 2'-O-methoxyethyl thymidine
  modified_base 19: mod_base = OTHER; note = 2'-O-methoxyethyl guanosine
  modified_base 20: mod_base = OTHER; note = 2'-O-methoxyethyl 5-methylcytidine
  misc_feature 1..5: note = RNA
  misc_feature 6..15: note = DNA
  misc_feature 16..20: note = RNA
aacaaggtgaagcgaagtgc

SEQ ID NO: 214 - DNA, 20 bp, synthetic construct
  source 1..20: mol_type = other DNA
  modified_base 1: mod_base = OTHER; note = 2'-O-methoxyethyl guanosine
  modified_base 2: mod_base = OTHER; note = 2'-O-methoxyethyl 5-methylcytidine
  modified_base 3: mod_base = OTHER; note = 2'-O-methoxyethyl adenosine
  modified_base 4: mod_base = OTHER; note = 2'-O-methoxyethyl guanosine
  modified_base 5: mod_base = OTHER; note = 2'-O-methoxyethyl adenosine
  modified_base 13: mod_base = OTHER; note = 2'-deoxy 5-methylcytidine
  modified_base 16: mod_base = OTHER; note = 2'-O-methoxyethyl adenosine
  modified_base 17: mod_base = OTHER; note = 2'-O-methoxyethyl adenosine
  modified_base 18: mod_base = OTHER; note = 2'-O-methoxyethyl 5-methylcytidine
  modified_base 19: mod_base = OTHER; note = 2'-O-methoxyethyl adenosine
  modified_base 20: mod_base = OTHER; note = 2'-O-methoxyethyl adenosine
  misc_feature 1..5: note = RNA
  misc_feature 6..15: note = DNA
  misc_feature 16..20: note = RNA
gcagaggtgaagcgaaacaa

SEQ ID NO: 215 - DNA, 20 bp, synthetic construct
  source 1..20: mol_type = other DNA
  modified_base 1: mod_base = OTHER; note = 2'-O-methyl guanosine
  modified_base 2: mod_base = OTHER; note = 2'-O-methyl 5-methylcytidine
  modified_base 3: mod_base = OTHER; note = 2'-O-methyl adenosine
  modified_base 4: mod_base = OTHER; note = 2'-O-methyl guanosine
  modified_base 5: mod_base = OTHER; note = 2'-O-methyl adenosine
  modified_base 13: mod_base = OTHER; note = 2'-deoxy 5-methylcytidine
  modified_base 16: mod_base = OTHER; note = 2'-O-methyl adenosine
  modified_base 17: mod_base = OTHER; note = 2'-O-methyl guanosine
  modified_base 18: mod_base = OTHER; note = 2'-O-methyl uridine
  modified_base 19: mod_base = OTHER; note = 2'-O-methyl guanosine
  modified_base 20: mod_base = OTHER; note = 2'-O-methyl 5-methylcytidine
  misc_feature 1..5: note = RNA
  misc_feature 6..15: note = DNA
  misc_feature 16..20: note = RNA
gcagaggtgaagcgaagtgc

SEQ ID NO: 216 - DNA, 20 bp, synthetic construct
  source 1..20: mol_type = other DNA
  modified_base 2: mod_base = OTHER; note = 2'-deoxy 5-methylcytidine
  modified_base 13: mod_base = OTHER; note = 2'-deoxy 5-methylcytidine
  modified_base 20: mod_base = OTHER; note = 2'-deoxy 5-methylcytidine
gcagaggtgaagcgaagtgc

SEQ ID NO: 217 - DNA, 30 bp, synthetic construct; identical to SEQ ID NO: 186
  source 1..30: mol_type = other DNA
  modified_base 2: mod_base = OTHER; note = 2'-deoxy 5-methylcytidine
  modified_base 13: mod_base = OTHER; note = 2'-deoxy 5-methylcytidine
  modified_base 20: mod_base = OTHER; note = 2'-deoxy 5-methylcytidine
  modified_base 24: mod_base = OTHER; note = 2'-deoxy 5-methylcytidine
  modified_base 27: mod_base = OTHER; note = 2'-deoxy 5-methylcytidine

SEQ ID NO: 218 - DNA, 20 bp, synthetic construct
  source 1..20: mol_type = other DNA
  modified_base 1: mod_base = OTHER; note = Locked nucleic acid with guanine base
  modified_base 2: mod_base = OTHER; note = Locked nucleic acid with cytosine base
  modified_base 3: mod_base = OTHER; note = Locked nucleic acid with adenine base
  modified_base 4: mod_base = OTHER; note = Locked nucleic acid with guanine base
  modified_base 5: mod_base = OTHER; note = Locked nucleic acid with adenine base
  modified_base 13: mod_base = OTHER; note = 2'-deoxy 5-methylcytidine
  modified_base 16: mod_base = OTHER; note = 2'-O-methoxyethyl adenosine
  modified_base 17: mod_base = OTHER; note = 2'-O-methoxyethyl guanosine
  modified_base 18: mod_base = OTHER; note = 2'-O-methoxyethyl thymidine
  modified_base 19: mod_base = OTHER; note = 2'-O-methoxyethyl guanosine
  modified_base 20: mod_base = OTHER; note = 2'-O-methoxyethyl 5-methylcytidine
  misc_feature 1..5: note = RNA
  misc_feature 6..15: note = DNA
  misc_feature 16..20: note = RNA
gcagaggtgaagcgaagtgc

SEQ ID NO: 219 - DNA, 20 bp, synthetic construct
  source 1..20: mol_type = other DNA
  modified_base 1: mod_base = OTHER; note = Locked nucleic acid with guanine base
  modified_base 2: mod_base = OTHER; note = 2'-O-methoxyethyl 5-methylcytidine
  modified_base 3: mod_base = OTHER; note = 2'-O-methoxyethyl adenosine
  modified_base 4: mod_base = OTHER; note = 2'-O-methoxyethyl guanosine
  modified_base 5: mod_base = OTHER; note = 2'-O-methoxyethyl adenosine
  modified_base 10: mod_base = OTHER; note = 2'-O-methoxyethyl adenosine
  modified_base 13: mod_base = OTHER; note = 2'-deoxy 5-methylcytidine
  modified_base 16: mod_base = OTHER; note = 2'-O-methoxyethyl adenosine
  modified_base 17: mod_base = OTHER; note = 2'-O-methoxyethyl guanosine
  modified_base 18: mod_base = OTHER; note = 2'-O-methoxyethyl thymidine
  modified_base 19: mod_base = OTHER; note = 2'-O-methoxyethyl guanosine
  modified_base 20: mod_base = OTHER; note = 2'-O-methoxyethyl 5-methylcytidine
  misc_feature 1..5: note = RNA
  misc_feature 6..9: note = DNA
  misc_feature 10: note = RNA
  misc_feature 11..15: note = DNA
  misc_feature 16..20: note = RNA
gcagaggtgaagcgaagtgc

SEQ ID NO: 220 - DNA, 20 bp, synthetic construct
  source 1..20: mol_type = other DNA
  modified_base 1: mod_base = OTHER; note = Locked nucleic acid with guanine base
  modified_base 2: mod_base = OTHER; note = Locked nucleic acid with cytosine base
  modified_base 3: mod_base = OTHER; note = 2'-O-methoxyethyl adenosine
  modified_base 4: mod_base = OTHER; note = 2'-O-methoxyethyl guanosine
  modified_base 5: mod_base = OTHER; note = 2'-O-methoxyethyl adenosine
  modified_base 10: mod_base = OTHER; note = 2'-O-methoxyethyl adenosine
  modified_base 13: mod_base = OTHER; note = 2'-deoxy 5-methylcytidine
  modified_base 16: mod_base = OTHER; note = 2'-O-methoxyethyl adenosine
  modified_base 17: mod_base = OTHER; note = 2'-O-methoxyethyl guanosine
  modified_base 18: mod_base = OTHER; note = 2'-O-methoxyethyl thymidine
  modified_base 19: mod_base = OTHER; note = 2'-O-methoxyethyl guanosine
  modified_base 20: mod_base = OTHER; note = 2'-O-methoxyethyl 5-methylcytidine
  misc_feature 1..5: note = RNA
  misc_feature 6..9: note = DNA
  misc_feature 10: note = RNA
  misc_feature 11..15: note = DNA
  misc_feature 16..20: note = RNA
gcagaggtgaagcgaagtgc

SEQ ID NO: 221 - DNA, 20 bp, synthetic construct
  source 1..20: mol_type = other DNA
  modified_base 1: mod_base = OTHER; note = Locked nucleic acid with guanine base
  modified_base 2: mod_base = OTHER; note = 2'-O-methoxyethyl 5-methylcytidine
  modified_base 3: mod_base = OTHER; note = Locked nucleic acid with adenine base
  modified_base 4: mod_base = OTHER; note = 2'-O-methoxyethyl guanosine
  modified_base 5: mod_base = OTHER; note = 2'-O-methoxyethyl adenosine
  modified_base 10: mod_base = OTHER; note = 2'-O-methoxyethyl adenosine
  modified_base 13: mod_base = OTHER; note = 2'-deoxy 5-methylcytidine
  modified_base 16: mod_base = OTHER; note = 2'-O-methoxyethyl adenosine
  modified_base 17: mod_base = OTHER; note = 2'-O-methoxyethyl guanosine
  modified_base 18: mod_base = OTHER; note = 2'-O-methoxyethyl thymidine
  modified_base 19: mod_base = OTHER; note = 2'-O-methoxyethyl guanosine
  modified_base 20: mod_base = OTHER; note = 2'-O-methoxyethyl 5-methylcytidine
  misc_feature 1..5: note = RNA
  misc_feature 6..9: note = DNA
  misc_feature 10: note = RNA
  misc_feature 11..15: note = DNA
  misc_feature 16..20: note = RNA
gcagaggtgaagcgaagtgc

SEQ ID NO: 222 - DNA, 20 bp, synthetic construct
  source 1..20: mol_type = other DNA
  modified_base 1: mod_base = OTHER; note = Locked nucleic acid with guanine base
  modified_base 2: mod_base = OTHER; note = 2'-O-methoxyethyl 5-methylcytidine
  modified_base 3: mod_base = OTHER; note = 2'-O-methoxyethyl adenosine
  modified_base 4: mod_base = OTHER; note = Locked nucleic acid with guanine base
  modified_base 5: mod_base = OTHER; note = 2'-O-methoxyethyl adenosine
  modified_base 10: mod_base = OTHER; note = 2'-O-methoxyethyl adenosine
  modified_base 13: mod_base = OTHER; note = 2'-deoxy 5-methylcytidine
  modified_base 16: mod_base = OTHER; note = 2'-O-methoxyethyl adenosine
  modified_base 17: mod_base = OTHER; note = 2'-O-methoxyethyl guanosine
  modified_base 18: mod_base = OTHER; note = 2'-O-methoxyethyl thymidine
  modified_base 19: mod_base = OTHER; note = 2'-O-methoxyethyl guanosine
  modified_base 20: mod_base = OTHER; note = 2'-O-methoxyethyl 5-methylcytidine
  misc_feature 1..5: note = RNA
  misc_feature 6..9: note = DNA
  misc_feature 10: note = RNA
  misc_feature 11..15: note = DNA
  misc_feature 16..20: note = RNA
gcagaggtgaagcgaagtgc

SEQ ID NO: 223 - DNA, 20 bp, synthetic construct
  source 1..20: mol_type = other DNA
  modified_base 1: mod_base = OTHER; note = Locked nucleic acid with guanine base
  modified_base 2: mod_base = OTHER; note = 2'-O-methoxyethyl 5-methylcytidine
  modified_base 3: mod_base = OTHER; note = 2'-O-methoxyethyl adenosine
  modified_base 4: mod_base = OTHER; note = 2'-O-methoxyethyl guanosine
  modified_base 5: mod_base = OTHER; note = Locked nucleic acid with adenine base
  modified_base 10: mod_base = OTHER; note = 2'-O-methoxyethyl adenosine
  modified_base 13: mod_base = OTHER; note = 2'-deoxy 5-methylcytidine
  modified_base 16: mod_base = OTHER; note = 2'-O-methoxyethyl adenosine
  modified_base 17: mod_base = OTHER; note = 2'-O-methoxyethyl guanosine
  modified_base 18: mod_base = OTHER; note = 2'-O-methoxyethyl thymidine
  modified_base 19: mod_base = OTHER; note = 2'-O-methoxyethyl guanosine
  modified_base 20: mod_base = OTHER; note = 2'-O-methoxyethyl 5-methylcytidine
  misc_feature 1..5: note = RNA
  misc_feature 6..9: note = DNA
  misc_feature 10: note = RNA
  misc_feature 11..15: note = DNA
  misc_feature 16..20: note = RNA
gcagaggtgaagcgaagtgc

SEQ ID NO: 224 - DNA, 20 bp, synthetic construct
  source 1..20: mol_type = other DNA
  modified_base 1: mod_base = OTHER; note = 2'fluoro 2'-deoxy guanosine
  modified_base 2: mod_base = OTHER; note = 2'fluoro 2'-deoxy cytidine
  modified_base 3: mod_base = OTHER; note = 2'-fluoro 2'-deoxyadenosine
  modified_base 4: mod_base = OTHER; note = 2'fluoro 2'-deoxy guanosine
  modified_base 5: mod_base = OTHER; note = 2'-fluoro 2'-deoxyadenosine
  modified_base 13: mod_base = OTHER; note = 2'-deoxy 5-methylcytidine
  modified_base 16: mod_base = OTHER; note = 2'-O-methoxyethyl adenosine
  modified_base 17: mod_base = OTHER; note = 2'-O-methoxyethyl guanosine
  modified_base 18: mod_base = OTHER; note = 2'-O-methoxyethyl thymidine
  modified_base 19: mod_base = OTHER; note = 2'-O-methoxyethyl guanosine
  modified_base 20: mod_base = OTHER; note = 2'-O-methoxyethyl 5-methylcytidine
  misc_feature 1..5: note = RNA
  misc_feature 6..15: note = DNA
  misc_feature 16..20: note = RNA
gcagaggtgaagcgaagtgc

SEQ ID NO: 225 - DNA, 40 bp, synthetic construct; identical to SEQ ID NO: 69
  source 1..40: mol_type = other DNA
  modified_base 1: mod_base = OTHER; note = 2'fluoro 2'-deoxy guanosine
  modified_base 2: mod_base = OTHER; note = 2'fluoro 2'-deoxy cytidine
  modified_base 3: mod_base = OTHER; note = 2'-fluoro 2'-deoxyadenosine
  modified_base 4: mod_base = OTHER; note = 2'fluoro 2'-deoxy guanosine
  modified_base 5: mod_base = OTHER; note = 2'-fluoro 2'-deoxyadenosine
  modified_base 13: mod_base = OTHER; note = 2'-deoxy 5-methylcytidine
  modified_base 16: mod_base = OTHER; note = 2'-O-methoxyethyl adenosine
  modified_base 17: mod_base = OTHER; note = 2'-O-methoxyethyl guanosine
  modified_base 18: mod_base = OTHER; note = 2'-O-methoxyethyl thymidine
  modified_base 19: mod_base = OTHER; note = 2'-O-methoxyethyl guanosine
  modified_base 20: mod_base = OTHER; note = 2'-O-methoxyethyl 5-methylcytidine
  modified_base 21: mod_base = OTHER; note = 2'-O-methoxyethyl adenosine
  modified_base 22: mod_base = OTHER; note = 2'-O-methoxyethyl adenosine
  modified_base 23: mod_base = OTHER; note = 2'-O-methoxyethyl 5-methylcytidine
  modified_base 24: mod_base = OTHER; note = 2'-O-methoxyethyl adenosine
  modified_base 25: mod_base = OTHER; note = 2'-O-methoxyethyl 5-methylcytidine
  modified_base 26: mod_base = OTHER; note = 2'-O-methoxyethyl adenosine
  modified_base 27: mod_base = OTHER; note = 2'-O-methoxyethyl adenosine
  modified_base 28: mod_base = OTHER; note = 2'-O-methoxyethyl 5-methylcytidine
  modified_base 29: mod_base = OTHER; note = 2'-O-methoxyethyl adenosine
  modified_base 30: mod_base = OTHER; note = 2'-O-methoxyethyl 5-methylcytidine
  modified_base 31: mod_base = OTHER; note = 2'-O-methoxyethyl adenosine
  modified_base 32: mod_base = OTHER; note = 2'-O-methoxyethyl adenosine
  modified_base 33: mod_base = OTHER; note = 2'-O-methoxyethyl 5-methylcytidine
  modified_base 34: mod_base = OTHER; note = 2'-O-methoxyethyl adenosine
  modified_base 35: mod_base = OTHER; note = 2'-O-methoxyethyl 5-methylcytidine
  modified_base 36: mod_base = OTHER; note = 2'-O-methoxyethyl adenosine
  modified_base 37: mod_base = OTHER; note = 2'-O-methoxyethyl adenosine
  modified_base 38: mod_base = OTHER; note = 2'-O-methoxyethyl 5-methylcytidine
  modified_base 39: mod_base = OTHER; note = 2'-O-methoxyethyl adenosine
  modified_base 40: mod_base = OTHER; note = 2'-O-methoxyethyl 5-methylcytidine
  misc_feature 1..5: note = RNA
  misc_feature 6..15: note = DNA
  misc_feature 16..40: note = RNA

SEQ ID NO: 226 - DNA, 20 bp, synthetic construct
  source 1..20: mol_type = other DNA
  modified_base 1: mod_base = OTHER; note = 2'fluoro 2'-deoxy guanosine
  modified_base 2: mod_base = OTHER; note = 2'fluoro 2'-deoxy cytidine
  modified_base 3: mod_base = OTHER; note = 2'fluoro 2'-deoxy guanosine
  modified_base 4: mod_base = OTHER; note = 2'-fluoro 2'-deoxyadenosine
  modified_base 5: mod_base = OTHER; note = 2'-fluoro 2'-deoxyadenosine
  modified_base 9: mod_base = OTHER; note = 2'-deoxy 5-methylcytidine
  modified_base 11: mod_base = OTHER; note = 2'-deoxy 5-methylcytidine
  modified_base 13: mod_base = OTHER; note = 2'-deoxy 5-methylcytidine
  modified_base 16: mod_base = OTHER; note = 2'-O-methoxyethyl uridine
  modified_base 17: mod_base = OTHER; note = 2'-O-methoxyethyl 5-methylcytidine
  modified_base 18: mod_base = OTHER; note = 2'-O-methoxyethyl 5-methylcytidine
  modified_base 19: mod_base = OTHER; note = 2'-O-methoxyethyl guanosine
  modified_base 20: mod_base = OTHER; note = 2'-O-methoxyethyl guanosine
  misc_feature 1..5: note = RNA
  misc_feature 6..15: note = DNA
  misc_feature 16..20: note = RNA
gcgaagtgcacacggtccgg

SEQ ID NO: 227 - DNA, 20 bp, synthetic construct
  source 1..20: mol_type = other DNA
  modified_base 1: mod_base = OTHER; note = 2'fluoro 2'-deoxy guanosine
  modified_base 2: mod_base = OTHER; note = 2'fluoro 2'-deoxy cytidine
  modified_base 3: mod_base = OTHER; note = 2'-fluoro 2'-deoxyadenosine
  modified_base 4: mod_base = OTHER; note = 2'fluoro 2'-deoxy guanosine
  modified_base 5: mod_base = OTHER; note = 2'-fluoro 2'-deoxyadenosine
  modified_base 13: mod_base = OTHER; note = 2'-deoxy 5-methylcytidine
  modified_base 16: mod_base = OTHER; note = 2'-O-methoxyethyl adenosine
  modified_base 17: mod_base = OTHER; note = 2'-O-methoxyethyl guanosine
  modified_base 18: mod_base = OTHER; note = 2'-O-methoxyethyl uridine
  modified_base 19: mod_base = OTHER; note = 2'-O-methoxyethyl guanosine
  modified_base 20: mod_base = OTHER; note = 2'-O-methoxyethyl 5-methylcytidine
  misc_feature 1..5: note = RNA
  misc_feature 6..15: note = DNA
  misc_feature 16..20: note = RNA
gcagaggtgaagcgaagtgc

SEQ ID NO: 228 - DNA, 20 bp, synthetic construct
  source 1..20: mol_type = other DNA
  modified_base 1: mod_base = OTHER; note = Locked nucleic acid with guanine base
  modified_base 2: mod_base = OTHER; note = 2'fluoro 2'-deoxy cytidine
  modified_base 3: mod_base = OTHER; note = 2'-fluoro 2'-deoxyadenosine
  modified_base 4: mod_base = OTHER; note = 2'fluoro 2'-deoxy guanosine
  modified_base 5: mod_base = OTHER; note = 2'-fluoro 2'-deoxyadenosine
  modified_base 13: mod_base = OTHER; note = 2'-deoxy 5-methylcytidine
  modified_base 16: mod_base = OTHER; note = 2'-O-methoxyethyl adenosine
  modified_base 17: mod_base = OTHER; note = 2'-O-methoxyethyl guanosine
  modified_base 18: mod_base = OTHER; note = 2'-O-methoxyethyl uridine
  modified_base 19: mod_base = OTHER; note = 2'-O-methoxyethyl guanosine
  modified_base 20: mod_base = OTHER; note = 2'-O-methoxyethyl 5-methylcytidine
  misc_feature 1..5: note = RNA
  misc_feature 6..15: note = DNA
  misc_feature 16..20: note = RNA
gcagaggtgaagcgaagtgc

SEQ ID NO: 229 - DNA, 20 bp, synthetic construct
  source 1..20: mol_type = other DNA
  modified_base 1: mod_base = OTHER; note = Locked nucleic acid with guanine base
  modified_base 2: mod_base = OTHER; note = Locked nucleic acid with cytosine base
  modified_base 3: mod_base = OTHER; note = 2'-fluoro 2'-deoxyadenosine
  modified_base 4: mod_base = OTHER; note = 2'fluoro 2'-deoxy guanosine
  modified_base 5: mod_base = OTHER; note = 2'-fluoro 2'-deoxyadenosine
  modified_base 13: mod_base = OTHER; note = 2'-deoxy 5-methylcytidine
  modified_base 16: mod_base = OTHER; note = 2'-O-methoxyethyl adenosine
  modified_base 17: mod_base = OTHER; note = 2'-O-methoxyethyl guanosine
  modified_base 18: mod_base = OTHER; note = 2'-O-methoxyethyl uridine
  modified_base 19: mod_base = OTHER; note = 2'-O-methoxyethyl guanosine
  modified_base 20: mod_base = OTHER; note = 2'-O-methoxyethyl 5-methylcytidine
  misc_feature 1..5: note = RNA
  misc_feature 6..15: note = DNA
  misc_feature 16..20: note = RNA
gcagaggtgaagcgaagtgc

SEQ ID NO: 230 - DNA, 20 bp, synthetic construct
  source 1..20: mol_type = other DNA
  modified_base 1: mod_base = OTHER; note = Locked nucleic acid with guanine base
  modified_base 2: mod_base = OTHER; note = 2'fluoro 2'-deoxy cytidine
  modified_base 3: mod_base = OTHER; note = Locked nucleic acid with adenine base
  modified_base 4: mod_base = OTHER; note = 2'fluoro 2'-deoxy guanosine
  modified_base 5: mod_base = OTHER; note = 2'-fluoro 2'-deoxyadenosine
  modified_base 13: mod_base = OTHER; note = 2'-deoxy 5-methylcytidine
  modified_base 16: mod_base = OTHER; note = 2'-O-methoxyethyl adenosine
  modified_base 17: mod_base = OTHER; note = 2'-O-methoxyethyl guanosine
  modified_base 18: mod_base = OTHER; note = 2'-O-methoxyethyl uridine
  modified_base 19: mod_base = OTHER; note = 2'-O-methoxyethyl guanosine
  modified_base 20: mod_base = OTHER; note = 2'-O-methoxyethyl 5-methylcytidine
  misc_feature 1..5: note = RNA
  misc_feature 6..15: note = DNA
  misc_feature 16..20: note = RNA
gcagaggtgaagcgaagtgc

SEQ ID NO: 231 - DNA, 20 bp, synthetic construct
  source 1..20: mol_type = other DNA
  modified_base 1: mod_base = OTHER; note = Locked nucleic acid with guanine base
  modified_base 2: mod_base = OTHER; note = 2'fluoro 2'-deoxy cytidine
  modified_base 3: mod_base = OTHER; note = 2'-fluoro 2'-deoxyadenosine
  modified_base 4: mod_base = OTHER; note = Locked nucleic acid with guanine base
  modified_base 5: mod_base = OTHER; note = 2'-fluoro 2'-deoxyadenosine
  modified_base 13: mod_base = OTHER; note = 2'-deoxy 5-methylcytidine
  modified_base 16: mod_base = OTHER; note = 2'-O-methoxyethyl adenosine
  modified_base 17: mod_base = OTHER; note = 2'-O-methoxyethyl guanosine
  modified_base 18: mod_base = OTHER; note = 2'-O-methoxyethyl uridine
  modified_base 19: mod_base = OTHER; note = 2'-O-methoxyethyl guanosine
  modified_base 20: mod_base = OTHER; note = 2'-O-methoxyethyl 5-methylcytidine
  misc_feature 1..5: note = RNA
  misc_feature 6..15: note = DNA
  misc_feature 16..20: note = RNA
gcagaggtgaagcgaagtgc

SEQ ID NO: 232 - DNA, 20 bp, synthetic construct
  source 1..20: mol_type = other DNA
  modified_base 1: mod_base = OTHER; note = Locked nucleic acid with guanine base
  modified_base 2: mod_base = OTHER; note = 2'fluoro 2'-deoxy cytidine
  modified_base 3: mod_base = OTHER; note = 2'-fluoro 2'-deoxyadenosine
  modified_base 4: mod_base = OTHER; note = 2'fluoro 2'-deoxy guanosine
  modified_base 5: mod_base = OTHER; note = Locked nucleic acid with adenine base
  modified_base 13: mod_base = OTHER; note = 2'-deoxy 5-methylcytidine
  modified_base 16: mod_base = OTHER; note = 2'-O-methoxyethyl adenosine
  modified_base 17: mod_base = OTHER; note = 2'-O-methoxyethyl guanosine
  modified_base 18: mod_base = OTHER; note = 2'-O-methoxyethyl uridine
  modified_base 19: mod_base = OTHER; note = 2'-O-methoxyethyl guanosine
  modified_base 20: mod_base = OTHER; note = 2'-O-methoxyethyl 5-methylcytidine
  misc_feature 1..5: note = RNA
  misc_feature 6..15: note = DNA
  misc_feature 16..20: note = RNA
gcagaggtgaagcgaagtgc

SEQ ID NO: 233 - DNA, 20 bp, synthetic construct
  source 1..20: mol_type = other DNA
  modified_base 1: mod_base = OTHER; note = Locked nucleic acid with guanine base
  modified_base 2: mod_base = OTHER; note = Locked nucleic acid with cytosine base
  modified_base 3: mod_base = OTHER; note = Locked nucleic acid with adenine base
  modified_base 4: mod_base = OTHER; note = 2'fluoro 2'-deoxy guanosine
  modified_base 5: mod_base = OTHER; note = 2'-fluoro 2'-deoxyadenosine
  modified_base 13: mod_base = OTHER; note = 2'-deoxy 5-methylcytidine
  modified_base 16: mod_base = OTHER; note = 2'-O-methoxyethyl adenosine
  modified_base 17: mod_base = OTHER; note = 2'-O-methoxyethyl guanosine
  modified_base 18: mod_base = OTHER; note = 2'-O-methoxyethyl uridine
  modified_base 19: mod_base = OTHER; note = 2'-O-methoxyethyl guanosine
  modified_base 20: mod_base = OTHER; note = 2'-O-methoxyethyl 5-methylcytidine
  misc_feature 1..5: note = RNA
  misc_feature 6..15: note = DNA
  misc_feature 16..20: note = RNA
gcagaggtgaagcgaagtgc

SEQ ID NO: 234 - DNA, 20 bp, synthetic construct
  source 1..20: mol_type = other DNA
  modified_base 1: mod_base = OTHER; note = Locked nucleic acid with guanine base
  modified_base 2: mod_base = OTHER; note = 2'fluoro 2'-deoxy cytidine
  modified_base 3: mod_base = OTHER; note = 2'-O-methoxyethyl adenosine
  modified_base 4: mod_base = OTHER; note = 2'fluoro 2'-deoxy guanosine
  modified_base 5: mod_base = OTHER; note = 2'-O-methoxyethyl adenosine
  modified_base 13: mod_base = OTHER; note = 2'-deoxy 5-methylcytidine
  modified_base 16: mod_base = OTHER; note = 2'-O-methoxyethyl adenosine
  modified_base 17: mod_base = OTHER; note = 2'-O-methoxyethyl guanosine
  modified_base 18: mod_base = OTHER; note = 2'-O-methoxyethyl uridine
  modified_base 19: mod_base = OTHER; note = 2'-O-methoxyethyl guanosine
  modified_base 20: mod_base = OTHER; note = 2'-O-methoxyethyl 5-methylcytidine
  misc_feature 1..5: note = RNA
  misc_feature 6..15: note = DNA
  misc_feature 16..20: note = RNA
gcagaggtgaagcgaagtgc

SEQ ID NO: 235 - DNA, 20 bp, synthetic construct
  source 1..20: mol_type = other DNA
  modified_base 1: mod_base = OTHER; note = Locked nucleic acid with guanine base
  modified_base 2: mod_base = OTHER; note = 2'-O-methoxyethyl 5-methylcytidine
  modified_base 3: mod_base = OTHER; note = 2'-fluoro 2'-deoxyadenosine
  modified_base 4: mod_base = OTHER; note = 2'-O-methoxyethyl guanosine
  modified_base 5: mod_base = OTHER; note = 2'-fluoro 2'-deoxyadenosine
  modified_base 13: mod_base = OTHER; note = 2'-deoxy 5-methylcytidine
  modified_base 16: mod_base = OTHER; note = 2'-O-methoxyethyl adenosine
  modified_base 17: mod_base = OTHER; note = 2'-O-methoxyethyl guanosine
  modified_base 18: mod_base = OTHER; note = 2'-O-methoxyethyl uridine
  modified_base 19: mod_base = OTHER; note = 2'-O-methoxyethyl guanosine
  modified_base 20: mod_base = OTHER; note = 2'-O-methoxyethyl 5-methylcytidine
  misc_feature 1..5: note = RNA
  misc_feature 6..15: note = DNA
  misc_feature 16..20: note = RNA
gcagaggtgaagcgaagtgc

SEQ ID NO: 236 - DNA, 20 bp, synthetic construct
  source 1..20: mol_type = other DNA
  modified_base 1: mod_base = OTHER; note = Locked nucleic acid with guanine base
  modified_base 2: mod_base = OTHER; note = Locked nucleic acid with cytosine base
  modified_base 3: mod_base = OTHER; note = 2'-fluoro 2'-deoxyadenosine
  modified_base 4: mod_base = OTHER; note = 2'-O-methoxyethyl guanosine
  modified_base 5: mod_base = OTHER; note = 2'-fluoro 2'-deoxyadenosine
  modified_base 13: mod_base = OTHER; note = 2'-deoxy 5-methylcytidine
  modified_base 16: mod_base = OTHER; note = 2'-O-methoxyethyl adenosine
  modified_base 17: mod_base = OTHER; note = 2'-O-methoxyethyl guanosine
  modified_base 18: mod_base = OTHER; note = 2'-O-methoxyethyl uridine
  modified_base 19: mod_base = OTHER; note = 2'-O-methoxyethyl guanosine
  modified_base 20: mod_base = OTHER; note = 2'-O-methoxyethyl 5-methylcytidine
  misc_feature 1..5: note = RNA
  misc_feature 6..15: note = DNA
  misc_feature 16..20: note = RNA
gcagaggtgaagcgaagtgc

SEQ ID NO: 237 - DNA, 20 bp, synthetic construct
  source 1..20: mol_type = other DNA
  modified_base 1: mod_base = OTHER; note = Locked nucleic acid with guanine base
  modified_base 2: mod_base = OTHER; note = Locked nucleic acid with cytosine base
  modified_base 3: mod_base = OTHER; note = 2'-O-methoxyethyl adenosine
  modified_base 4: mod_base = OTHER; note = 2'fluoro 2'-deoxy guanosine
  modified_base 5: mod_base = OTHER; note = 2'-O-methoxyethyl adenosine
  modified_base 13: mod_base = OTHER; note = 2'-deoxy 5-methylcytidine
  modified_base 16: mod_base = OTHER; note = 2'-O-methoxyethyl adenosine
  modified_base 17: mod_base = OTHER; note = 2'-O-methoxyethyl guanosine
  modified_base 18: mod_base = OTHER; note = 2'-O-methoxyethyl uridine
  modified_base 19: mod_base = OTHER; note = 2'-O-methoxyethyl guanosine
  modified_base 20: mod_base = OTHER; note = 2'-O-methoxyethyl 5-methylcytidine
  misc_feature 1..5: note = RNA
  misc_feature 6..15: note = DNA
  misc_feature 16..20: note = RNA
gcagaggtgaagcgaagtgc

SEQ ID NO: 238 - DNA, 20 bp, synthetic construct
  source 1..20: mol_type = other DNA
  modified_base 1: mod_base = OTHER; note = Locked nucleic acid with guanine base
  modified_base 2: mod_base = OTHER; note = 2'-O-methoxyethyl 5-methylcytidine
  modified_base 3: mod_base = OTHER; note = 2'-O-methoxyethyl adenosine
  modified_base 4: mod_base = OTHER; note = 2'-O-methoxyethyl guanosine
  modified_base 5: mod_base = OTHER; note = 2'-O-methoxyethyl adenosine
  modified_base 13: mod_base = OTHER; note = 2'-deoxy 5-methylcytidine
  modified_base 16: mod_base = OTHER; note = 2'-O-methoxyethyl adenosine
  modified_base 17: mod_base = OTHER; note = 2'-O-methoxyethyl guanosine
  modified_base 18: mod_base = OTHER; note = 2'-O-methoxyethyl uridine
  modified_base 19: mod_base = OTHER; note = 2'-O-methoxyethyl guanosine
  modified_base 20: mod_base = OTHER; note = 2'-O-methoxyethyl 5-methylcytidine
  misc_feature 1..5: note = RNA
  misc_feature 6..15: note = DNA
  misc_feature 16..20: note = RNA
gcagaggtgaagcgaagtgc

SEQ ID NO: 239 - DNA, 20 bp, synthetic construct
  source 1..20: mol_type = other DNA
  modified_base 1: mod_base = OTHER; note = Locked nucleic acid with guanine base
  modified_base 2: mod_base = OTHER; note = Locked nucleic acid with cytosine base
  modified_base 3: mod_base = OTHER; note = 2'-O-methoxyethyl adenosine
  modified_base 4: mod_base = OTHER; note = 2'-O-methoxyethyl guanosine
  modified_base 5: mod_base = OTHER; note = 2'-O-methoxyethyl adenosine
  modified_base 13: mod_base = OTHER; note = 2'-deoxy 5-methylcytidine
  modified_base 16: mod_base = OTHER; note = 2'-O-methoxyethyl adenosine
  modified_base 17: mod_base = OTHER; note = 2'-O-methoxyethyl guanosine
  modified_base 18: mod_base = OTHER; note = 2'-O-methoxyethyl uridine
  modified_base 19: mod_base = OTHER; note = 2'-O-methoxyethyl guanosine
  modified_base 20: mod_base = OTHER; note = 2'-O-methoxyethyl 5-methylcytidine
  misc_feature 1..5: note = RNA
  misc_feature 6..15: note = DNA
  misc_feature 16..20: note = RNA
gcagaggtgaagcgaagtgc

SEQ ID NO: 240 - DNA, 20 bp, synthetic construct
  source 1..20: mol_type = other DNA
  modified_base 1: mod_base = OTHER; note = Locked nucleic acid with guanine base
  modified_base 2: mod_base = OTHER; note = Locked nucleic acid with cytosine base
  modified_base 3: mod_base = OTHER; note = Locked nucleic acid with adenine base
  modified_base 4: mod_base = OTHER; note = 2'-O-methoxyethyl guanosine
  modified_base 5: mod_base = OTHER; note = 2'-O-methoxyethyl adenosine
  modified_base 13: mod_base = OTHER; note = 2'-deoxy 5-methylcytidine
  modified_base 16: mod_base = OTHER; note = 2'-O-methoxyethyl adenosine
  modified_base 17: mod_base = OTHER; note = 2'-O-methoxyethyl guanosine
  modified_base 18: mod_base = OTHER; note = 2'-O-methoxyethyl uridine
  modified_base 19: mod_base = OTHER; note = 2'-O-methoxyethyl guanosine
  modified_base 20: mod_base = OTHER; note = 2'-O-methoxyethyl 5-methylcytidine
  misc_feature 1..5: note = RNA
  misc_feature 6..15: note = DNA
  misc_feature 16..20: note = RNA
gcagaggtgaagcgaagtgc

SEQ ID NO: 241 - DNA, 20 bp, synthetic construct
  source 1..20: mol_type = other DNA
  modified_base 1: mod_base = OTHER; note = Locked nucleic acid with guanine base
  modified_base 2: mod_base = OTHER; note = Locked nucleic acid with cytosine base
  modified_base 3: mod_base = OTHER; note = Locked nucleic acid with adenine base
  modified_base 4: mod_base = OTHER; note = Locked nucleic acid with guanine base
  modified_base 5: mod_base = OTHER; note = 2'-O-methoxyethyl adenosine
  modified_base 13: mod_base = OTHER; note = 2'-deoxy 5-methylcytidine
  modified_base 16: mod_base = OTHER; note = 2'-O-methoxyethyl adenosine
  modified_base 17: mod_base = OTHER; note = 2'-O-methoxyethyl guanosine
  modified_base 18: mod_base = OTHER; note = 2'-O-methoxyethyl uridine
  modified_base 19: mod_base = OTHER; note = 2'-O-methoxyethyl guanosine
  modified_base 20: mod_base = OTHER; note = 2'-O-methoxyethyl 5-methylcytidine
  misc_feature 1..5: note = RNA
  misc_feature 6..15: note = DNA
  misc_feature 16..20: note = RNA
gcagaggtgaagcgaagtgc

SEQ ID NO: 242 - DNA, 20 bp, synthetic construct
  source 1..20: mol_type = other DNA
  modified_base 1: mod_base = OTHER; note = 2'-O-methoxyethyl guanosine
  modified_base 2: mod_base = OTHER; note = 2'-O-methoxyethyl guanosine
  modified_base 3: mod_base = OTHER; note = 2'-O-methoxyethyl adenosine
  modified_base 4: mod_base = OTHER; note = 2'-O-methoxyethyl guanosine
  modified_base 5: mod_base = OTHER; note = 2'-O-methoxyethyl adenosine
  modified_base 13: mod_base = OTHER; note = 2'-deoxy 5-methylcytidine
  modified_base 16: mod_base = OTHER; note = 2'-O-methoxyethyl adenosine
  modified_base 17: mod_base = OTHER; note = 2'-O-methoxyethyl guanosine
  modified_base 18: mod_base = OTHER; note = 2'-O-methoxyethyl thymidine
  modified_base 19: mod_base = OTHER; note = 2'-O-methoxyethyl guanosine
  modified_base 20: mod_base = OTHER; note = 2'-O-methoxyethyl 5-methylcytidine
  misc_feature 1..5: note = RNA
  misc_feature 6..15: note = DNA
  misc_feature 16..20: note = RNA
ggagaggtgaagcgaagtgc

SEQ ID NO: 243 - DNA, 20 bp, synthetic construct
  source 1..20: mol_type = other DNA
  modified_base 1: mod_base = OTHER; note = 2'-O-methoxyethyl guanosine
  modified_base 2: mod_base = OTHER; note = 2'-O-methoxyethyl 5-methylcytidine
  modified_base 3: mod_base = OTHER; note = 2'-O-methoxyethyl thymidine
  modified_base 4: mod_base = OTHER; note = 2'-O-methoxyethyl guanosine
  modified_base 5: mod_base = OTHER; note = 2'-O-methoxyethyl adenosine
  modified_base 13: mod_base = OTHER; note = 2'-deoxy 5-methylcytidine
  modified_base 16: mod_base = OTHER; note = 2'-O-methoxyethyl adenosine
  modified_base 17: mod_base = OTHER; note = 2'-O-methoxyethyl guanosine
  modified_base 18: mod_base = OTHER; note = 2'-O-methoxyethyl thymidine
  modified_base 19: mod_base = OTHER; note = 2'-O-methoxyethyl guanosine
  modified_base 20: mod_base = OTHER; note = 2'-O-methoxyethyl 5-methylcytidine
  misc_feature 1..5: note = RNA
  misc_feature 6..15: note = DNA
  misc_feature 16..20: note = RNA
gctgaggtgaagcgaagtgc

SEQ ID NO: 244 - DNA, 20 bp, synthetic construct
  source 1..20: mol_type = other DNA
  modified_base 1: mod_base = OTHER; note = 2'-O-methoxyethyl guanosine
  modified_base 2: mod_base = OTHER; note = 2'-O-methoxyethyl 5-methylcytidine
  modified_base 3: mod_base = OTHER; note = 2'-O-methoxyethyl adenosine
  modified_base 4: mod_base = OTHER; note = 2'-O-methoxyethyl 5-methylcytidine
  modified_base 5: mod_base = OTHER; note = 2'-O-methoxyethyl adenosine
  modified_base 13: mod_base = OTHER; note = 2'-deoxy 5-methylcytidine
  modified_base 16: mod_base = OTHER; note = 2'-O-methoxyethyl adenosine
  modified_base 17: mod_base = OTHER; note = 2'-O-methoxyethyl guanosine
  modified_base 18: mod_base = OTHER; note = 2'-O-methoxyethyl thymidine
  modified_base 19: mod_base = OTHER; note = 2'-O-methoxyethyl guanosine
  modified_base 20: mod_base = OTHER; note = 2'-O-methoxyethyl 5-methylcytidine
  misc_feature 1..5: note = RNA
  misc_feature 6..15: note = DNA
  misc_feature 16..20: note = RNA
gcacaggtgaagcgaagtgc

SEQ ID NO: 245 - DNA, 20 bp, synthetic construct
  source 1..20: mol_type = other DNA
  modified_base 1: mod_base = OTHER; note = 2'-O-methoxyethyl guanosine
  modified_base 2: mod_base = OTHER; note = 2'-O-methoxyethyl 5-methylcytidine
  modified_base 3: mod_base = OTHER; note = 2'-O-methoxyethyl adenosine
  modified_base 4: mod_base = OTHER; note = 2'-O-methoxyethyl guanosine
  modified_base 5: mod_base = OTHER; note = 2'-O-methoxyethyl thymidine
  modified_base 13: mod_base = OTHER; note = 2'-deoxy 5-methylcytidine
  modified_base 16: mod_base = OTHER; note = 2'-O-methoxyethyl adenosine
  modified_base 17: mod_base = OTHER; note = 2'-O-methoxyethyl guanosine
  modified_base 18: mod_base = OTHER; note = 2'-O-methoxyethyl thymidine
  modified_base 19: mod_base = OTHER; note = 2'-O-methoxyethyl guanosine
  modified_base 20: mod_base = OTHER; note = 2'-O-methoxyethyl 5-methylcytidine
  misc_feature 1..5: note = RNA
  misc_feature 6..15: note = DNA
  misc_feature 16..20: note = RNA
gcagtggtgaagcgaagtgc

SEQ ID NO: 246 - DNA, 20 bp, synthetic construct
  source 1..20: mol_type = other DNA
  modified_base 1: mod_base = OTHER; note = 2'-O-methoxyethyl guanosine
  modified_base 2: mod_base = OTHER; note = 2'-O-methoxyethyl 5-methylcytidine
  modified_base 3: mod_base = OTHER; note = 2'-O-methoxyethyl adenosine
  modified_base 4: mod_base = OTHER; note = 2'-O-methoxyethyl guanosine
  modified_base 5: mod_base = OTHER; note = 2'-O-methoxyethyl adenosine
  modified_base 6: mod_base = OTHER; note = 2'-deoxy 5-methylcytidine
  modified_base 13: mod_base = OTHER; note = 2'-deoxy 5-methylcytidine
  modified_base 16: mod_base = OTHER; note = 2'-O-methoxyethyl adenosine
  modified_base 17: mod_base = OTHER; note = 2'-O-methoxyethyl guanosine
  modified_base 18: mod_base = OTHER; note = 2'-O-methoxyethyl thymidine
  modified_base 19: mod_base = OTHER; note = 2'-O-methoxyethyl guanosine
  modified_base 20: mod_base = OTHER; note = 2'-O-methoxyethyl 5-methylcytidine
  misc_feature 1..5: note = RNA
  misc_feature 6..15: note = DNA
  misc_feature 16..20: note = RNA
gcagacgtgaagcgaagtgc

SEQ ID NO: 247 - DNA, 20 bp, synthetic construct
  source 1..20: mol_type = other DNA
  modified_base 1: mod_base = OTHER; note = 2'-O-methoxyethyl guanosine
  modified_base 2: mod_base = OTHER; note = 2'-O-methoxyethyl 5-methylcytidine
  modified_base 3: mod_base = OTHER; note = 2'-O-methoxyethyl adenosine
  modified_base 4: mod_base = OTHER; note = 2'-O-methoxyethyl guanosine
  modified_base 5: mod_base = OTHER; note = 2'-O-methoxyethyl adenosine
  modified_base 7: mod_base = OTHER; note = 2'-deoxy 5-methylcytidine
  modified_base 13: mod_base = OTHER; note = 2'-deoxy 5-methylcytidine
  modified_base 16: mod_base = OTHER; note = 2'-O-methoxyethyl adenosine
  modified_base 17: mod_base = OTHER; note = 2'-O-methoxyethyl guanosine
  modified_base 18: mod_base = OTHER; note = 2'-O-methoxyethyl thymidine
  modified_base 19: mod_base = OTHER; note = 2'-O-methoxyethyl guanosine
  modified_base 20: mod_base = OTHER; note = 2'-O-methoxyethyl 5-methylcytidine
  misc_feature 1..5: note = RNA
  misc_feature 6..15: note = DNA
  misc_feature 16..20: note = RNA
gcagagctgaagcgaagtgc

SEQ ID NO: 248 - DNA, 20 bp, synthetic construct
  source 1..20: mol_type = other DNA
  modified_base 1: mod_base = OTHER; note = 2'-O-methoxyethyl 5-methylcytidine
  modified_base 2: mod_base = OTHER; note = 2'-O-methoxyethyl 5-methylcytidine
  modified_base 3: mod_base = OTHER; note = 2'-O-methoxyethyl adenosine
  modified_base 4: mod_base = OTHER; note = 2'-O-methoxyethyl guanosine
  modified_base 5: mod_base = OTHER; note = 2'-O-methoxyethyl adenosine
  modified_base 13: mod_base = OTHER; note = 2'-deoxy 5-methylcytidine
  modified_base 16: mod_base = OTHER; note = 2'-O-methoxyethyl adenosine
  modified_base 17: mod_base = OTHER; note = 2'-O-methoxyethyl guanosine
  modified_base 18: mod_base = OTHER; note = 2'-O-methoxyethyl thymidine
  modified_base 19: mod_base = OTHER; note = 2'-O-methoxyethyl guanosine
  modified_base 20: mod_base = OTHER; note = 2'-O-methoxyethyl 5-methylcytidine
  misc_feature 1..5: note = RNA
  misc_feature 6..15: note = DNA
  misc_feature 16..20: note = RNA
ccagaggtgaagcgaagtgc

SEQ ID NO: 249 - DNA, 20 bp, synthetic construct
  source 1..20: mol_type = other DNA
  modified_base 1: mod_base = OTHER; note = 2'-F-ANA with guanine base
  modified_base 2: mod_base = OTHER; note = 2'-F-ANA with cytosine base
  modified_base 3: mod_base = OTHER; note = 2'-F-ANA with adenine base
  modified_base 4: mod_base = OTHER; note = 2'-F-ANA with guanine base
  modified_base 5: mod_base = OTHER; note = 2'-F-ANA with adenine base
  modified_base 13: mod_base = OTHER; note = 2'-deoxy 5-methylcytidine
  modified_base 16: mod_base = OTHER; note = 2'-O-methoxyethyl adenosine
  modified_base 17: mod_base = OTHER; note = 2'-O-methoxyethyl guanosine
  modified_base 18: mod_base = OTHER; note = 2'-O-methoxyethyl uridine
  modified_base 19: mod_base = OTHER; note = 2'-O-methoxyethyl guanosine
  modified_base 20: mod_base = OTHER; note = 2'-O-methoxyethyl 5-methylcytidine
  misc_feature 1..5: note = RNA
  misc_feature 6..15: note = DNA
  misc_feature 16..20: note = RNA
gcagaggtgaagcgaagtgc

SEQ ID NO: 250 - DNA, 20 bp, synthetic construct
  source 1..20: mol_type = other DNA
  modified_base 1: mod_base = OTHER; note = 2'-O-methoxyethyl guanosine
  modified_base 2: mod_base = OTHER; note = 2'-O-methoxyethyl 5-methylcytidine
  modified_base 3: mod_base = OTHER; note = 2'-F-ANA with adenine base
  modified_base 4: mod_base = OTHER; note = 2'-F-ANA with guanine base
  modified_base 5: mod_base = OTHER; note = 2'-F-ANA with adenine base
  modified_base 13: mod_base = OTHER; note = 2'-deoxy 5-methylcytidine
  modified_base 16: mod_base = OTHER; note = 2'-O-methoxyethyl adenosine
  modified_base 17: mod_base = OTHER; note = 2'-O-methoxyethyl guanosine
  modified_base 18: mod_base = OTHER; note = 2'-O-methoxyethyl uridine
  modified_base 19: mod_base = OTHER; note = 2'-O-methoxyethyl guanosine
  modified_base 20: mod_base = OTHER; note = 2'-O-methoxyethyl 5-methylcytidine
  misc_feature 1..5: note = RNA
  misc_feature 6..15: note = DNA
  misc_feature 16..20: note = RNA
gcagaggtgaagcgaagtgc

SEQ ID NO: 251 - DNA, 20 bp, synthetic construct
  source 1..20: mol_type = other DNA
  modified_base 1: mod_base = OTHER; note = Locked nucleic acid with guanine base
  modified_base 2: mod_base = OTHER; note = Locked nucleic acid with cytosine base
  modified_base 3: mod_base = OTHER; note = 2'-O-methoxyethyl adenosine
  modified_base 4: mod_base = OTHER; note = 2'-O-methoxyethyl guanosine
  modified_base 5: mod_base = OTHER; note = 2'-O-methoxyethyl adenosine
  modified_base 13: mod_base = OTHER; note = 2'-deoxy 5-methylcytidine
  modified_base 16: mod_base = OTHER; note = 2'-O-methoxyethyl adenosine
  modified_base 17: mod_base = OTHER; note = 2'-O-methoxyethyl guanosine
  modified_base 18: mod_base = OTHER; note = 2'-O-methoxyethyl thymidine
  modified_base 19: mod_base = OTHER; note = 2'-O-methoxyethyl guanosine
  modified_base 20: mod_base = OTHER; note = 2'-O-methoxyethyl 5-methylcytidine
  misc_feature 1..5: note = RNA
  misc_feature 6..15: note = DNA
  misc_feature 16..20: note = RNA
gcagaggtgaagcgaagtgc

SEQ ID NO: 252 - DNA, 20 bp, synthetic construct
  source 1..20: mol_type = other DNA
  modified_base 1: mod_base = OTHER; note = Locked nucleic acid with guanine base
  modified_base 2: mod_base = OTHER; note = 2'-O-methoxyethyl 5-methylcytidine
  modified_base 3: mod_base = OTHER; note = Locked nucleic acid with adenine base
  modified_base 4: mod_base = OTHER; note = 2'-O-methoxyethyl guanosine
  modified_base 5: mod_base = OTHER; note = 2'-O-methoxyethyl adenosine
  modified_base 13: mod_base = OTHER; note = 2'-deoxy 5-methylcytidine
  modified_base 16: mod_base = OTHER; note = 2'-O-methoxyethyl adenosine
  modified_base 17: mod_base = OTHER; note = 2'-O-methoxyethyl guanosine
  modified_base 18: mod_base = OTHER; note = 2'-O-methoxyethyl thymidine
  modified_base 19: mod_base = OTHER; note = 2'-O-methoxyethyl guanosine
  modified_base 20: mod_base = OTHER; note = 2'-O-methoxyethyl 5-methylcytidine
  misc_feature 1..5: note = RNA
  misc_feature 6..15: note = DNA
  misc_feature 16..20: note = RNA
gcagaggtgaagcgaagtgc

SEQ ID NO: 253 - DNA, 20 bp, synthetic construct
  source 1..20: mol_type = other DNA
  modified_base 1: mod_base = OTHER; note = Locked nucleic acid with guanine base
  modified_base 2: mod_base = OTHER; note = 2'-O-methoxyethyl 5-methylcytidine
  modified_base 3: mod_base = OTHER; note = 2'-O-methoxyethyl adenosine
  modified_base 4: mod_base = OTHER; note = Locked nucleic acid with guanine base
  modified_base 5: mod_base = OTHER; note = 2'-O-methoxyethyl adenosine
  modified_base 13: mod_base = OTHER; note = 2'-deoxy 5-methylcytidine
  modified_base 16: mod_base = OTHER; note = 2'-O-methoxyethyl adenosine
  modified_base 17: mod_base = OTHER; note = 2'-O-methoxyethyl guanosine
  modified_base 18: mod_base = OTHER; note = 2'-O-methoxyethyl thymidine
  modified_base 19: mod_base = OTHER; note = 2'-O-methoxyethyl guanosine
  modified_base 20: mod_base = OTHER; note = 2'-O-methoxyethyl 5-methylcytidine
  misc_feature 1..5: note = RNA
  misc_feature 6..15: note = DNA
  misc_feature 16..20: note = RNA
gcagaggtgaagcgaagtgc

SEQ ID NO: 254 - DNA, 20 bp, synthetic construct
  source 1..20: mol_type = other DNA
  modified_base 1: mod_base = OTHER; note = Locked nucleic acid with guanine base
  modified_base 2: mod_base = OTHER; note = 2'-O-methoxyethyl 5-methylcytidine
  modified_base 3: mod_base = OTHER; note = 2'-O-methoxyethyl adenosine
  modified_base 4: mod_base = OTHER; note = 2'-O-methoxyethyl guanosine
  modified_base 5: mod_base = OTHER; note = Locked nucleic acid with adenine base
  modified_base 13: mod_base = OTHER; note = 2'-deoxy 5-methylcytidine
  modified_base 16: mod_base = OTHER; note = 2'-O-methoxyethyl adenosine
  modified_base 17: mod_base = OTHER; note = 2'-O-methoxyethyl guanosine
  modified_base 18: mod_base = OTHER; note = 2'-O-methoxyethyl thymidine
  modified_base 19: mod_base = OTHER; note = 2'-O-methoxyethyl guanosine
  modified_base 20: mod_base = OTHER; note = 2'-O-methoxyethyl 5-methylcytidine
  misc_feature 1..5: note = RNA
  misc_feature 6..15: note = DNA
  misc_feature 16..20: note = RNA
gcagaggtgaagcgaagtgc

SEQ ID NO: 255 - DNA, 20 bp, synthetic construct
  source 1..20: mol_type = other DNA
  modified_base 1: mod_base = OTHER; note = 2'-O-methoxyethyl guanosine
  modified_base 2: mod_base = OTHER; note = Locked nucleic acid with cytosine base
  modified_base 3: mod_base = OTHER; note = Locked nucleic acid with adenine base
  modified_base 4: mod_base = OTHER; note = 2'-O-methoxyethyl guanosine
  modified_base 5: mod_base = OTHER; note = 2'-O-methoxyethyl adenosine
  modified_base 13: mod_base = OTHER; note = 2'-deoxy 5-methylcytidine
  modified_base 16: mod_base = OTHER; note = 2'-O-methoxyethyl adenosine
  modified_base 17: mod_base = OTHER; note = 2'-O-methoxyethyl guanosine
  modified_base 18: mod_base = OTHER; note = 2'-O-methoxyethyl thymidine
  modified_base 19: mod_base = OTHER; note = 2'-O-methoxyethyl guanosine
  modified_base 20: mod_base = OTHER; note = 2'-O-methoxyethyl 5-methylcytidine
  misc_feature 1..5: note = RNA
  misc_feature 6..15: note = DNA
  misc_feature 16..20: note = RNA
gcagaggtgaagcgaagtgc

SEQ ID NO: 256 - DNA, 20 bp, synthetic construct
  source 1..20: mol_type = other DNA
  modified_base 1: mod_base = OTHER; note = 2'-O-methoxyethyl guanosine
  modified_base 2: mod_base = OTHER; note = Locked nucleic acid with cytosine base
  modified_base 3: mod_base = OTHER; note = 2'-O-methoxyethyl adenosine
  modified_base 4: mod_base = OTHER; note = Locked nucleic acid with guanine base
  modified_base 5: mod_base = OTHER; note = 2'-O-methoxyethyl adenosine
  modified_base 13: mod_base = OTHER; note = 2'-deoxy 5-methylcytidine
  modified_base 16: mod_base = OTHER; note = 2'-O-methoxyethyl adenosine
  modified_base 17: mod_base = OTHER; note = 2'-O-methoxyethyl guanosine
  modified_base 18: mod_base = OTHER; note = 2'-O-methoxyethyl thymidine
  modified_base 19: mod_base = OTHER; note = 2'-O-methoxyethyl guanosine
  modified_base 20: mod_base = OTHER; note = 2'-O-methoxyethyl 5-methylcytidine
  misc_feature 1..5: note = RNA
  misc_feature 6..15: note = DNA
  misc_feature 16..20: note = RNA
gcagaggtgaagcgaagtgc

SEQ ID NO: 257 - DNA, 20 bp, synthetic construct
  source 1..20: mol_type = other DNA
  modified_base 1: mod_base = OTHER; note = 2'-O-methoxyethyl guanosine
  modified_base 2: mod_base = OTHER; note = Locked nucleic acid with cytosine base
  modified_base 3: mod_base = OTHER; note = 2'-O-methoxyethyl adenosine
  modified_base 4: mod_base = OTHER; note = 2'-O-methoxyethyl guanosine
  modified_base 5: mod_base = OTHER; note = Locked nucleic acid with adenine base
  modified_base 13: mod_base = OTHER; note = 2'-deoxy 5-methylcytidine
  modified_base 16: mod_base = OTHER; note = 2'-O-methoxyethyl adenosine
  modified_base 17: mod_base = OTHER; note = 2'-O-methoxyethyl guanosine
  modified_base 18: mod_base = OTHER; note = 2'-O-methoxyethyl thymidine
  modified_base 19: mod_base = OTHER; note = 2'-O-methoxyethyl guanosine
  modified_base 20: mod_base = OTHER; note = 2'-O-methoxyethyl 5-methylcytidine
  misc_feature 1..5: note = RNA
  misc_feature 6..15: note = DNA
  misc_feature 16..20: note = RNA
gcagaggtgaagcgaagtgc

SEQ ID NO: 258 - DNA, 20 bp, synthetic construct
  source 1..20: mol_type = other DNA
  modified_base 1: mod_base = OTHER; note = 2'-O-methoxyethyl guanosine
  modified_base 2: mod_base = OTHER; note = 2'-O-methoxyethyl 5-methylcytidine
  modified_base 3: mod_base = OTHER; note = Locked nucleic acid with adenine base
  modified_base 4: mod_base = OTHER; note = Locked nucleic acid with guanine base
  modified_base 5: mod_base = OTHER; note = 2'-O-methoxyethyl adenosine
  modified_base 13: mod_base = OTHER; note = 2'-deoxy 5-methylcytidine
  modified_base 16: mod_base = OTHER; note = 2'-O-methoxyethyl adenosine
  modified_base 17: mod_base = OTHER; note = 2'-O-methoxyethyl guanosine
  modified_base 18: mod_base = OTHER; note = 2'-O-methoxyethyl thymidine
  modified_base 19: mod_base = OTHER; note = 2'-O-methoxyethyl guanosine
  modified_base 20: mod_base = OTHER; note = 2'-O-methoxyethyl 5-methylcytidine
  misc_feature 1..5: note = RNA
  misc_feature 6..15: note = DNA
  misc_feature 16..20: note = RNA
gcagaggtgaagcgaagtgc

SEQ ID NO: 259 - DNA, 20 bp, synthetic construct
  source 1..20: mol_type = other DNA
  modified_base 1: mod_base = OTHER; note = 2'-O-methoxyethyl guanosine
  modified_base 2: mod_base = OTHER; note = 2'-O-methoxyethyl 5-methylcytidine
  modified_base 3: mod_base = OTHER; note = Locked nucleic acid with adenine base
  modified_base 4: mod_base = OTHER; note = 2'-O-methoxyethyl guanosine
  modified_base 5: mod_base = OTHER; note = Locked nucleic acid with adenine base
  modified_base 13: mod_base = OTHER; note = 2'-deoxy 5-methylcytidine
  modified_base 16: mod_base = OTHER; note = 2'-O-methoxyethyl adenosine
  modified_base 17: mod_base = OTHER; note = 2'-O-methoxyethyl guanosine
  modified_base 18: mod_base = OTHER; note = 2'-O-methoxyethyl thymidine
  modified_base 19: mod_base = OTHER; note = 2'-O-methoxyethyl guanosine
  modified_base 20: mod_base = OTHER; note = 2'-O-methoxyethyl 5-methylcytidine
  misc_feature 1..5: note = RNA
  misc_feature 6..15: note = DNA
  misc_feature 16..20: note = RNA
gcagaggtgaagcgaagtgc

SEQ ID NO: 260 - DNA, 20 bp, synthetic construct
  source 1..20: mol_type = other DNA
  modified_base 1: mod_base = OTHER; note = 2'-O-methoxyethyl guanosine
  modified_base 2: mod_base = OTHER; note = 2'-O-methoxyethyl 5-methylcytidine
  modified_base 3: mod_base = OTHER; note = 2'-O-methoxyethyl adenosine
  modified_base 4: mod_base = OTHER; note = Locked nucleic acid with guanine base
  modified_base 5: mod_base = OTHER; note = Locked nucleic acid with adenine base
  modified_base 13: mod_base = OTHER; note = 2'-deoxy 5-methylcytidine
  modified_base 16: mod_base = OTHER; note = 2'-O-methoxyethyl adenosine
  modified_base 17: mod_base = OTHER; note = 2'-O-methoxyethyl guanosine
  modified_base 18: mod_base = OTHER; note = 2'-O-methoxyethyl thymidine
  modified_base 19: mod_base = OTHER; note = 2'-O-methoxyethyl guanosine
  modified_base 20: mod_base = OTHER; note = 2'-O-methoxyethyl 5-methylcytidine
  misc_feature 1..5: note = RNA
  misc_feature 6..15: note = DNA
  misc_feature 16..20: note = RNA
gcagaggtgaagcgaagtgc

SEQ ID NO: 261 - DNA, 20 bp, synthetic construct
  source 1..20: mol_type = other DNA
  modified_base 1: mod_base = OTHER; note = Locked nucleic acid with guanine base
  modified_base 2: mod_base = OTHER; note = Locked nucleic acid with cytosine base
  modified_base 3: mod_base = OTHER; note = Locked nucleic acid with adenine base
  modified_base 4: mod_base = OTHER; note = 2'-O-methoxyethyl guanosine
  modified_base 5: mod_base = OTHER; note = 2'-O-methoxyethyl adenosine
  modified_base 13: mod_base = OTHER; note = 2'-deoxy 5-methylcytidine
  modified_base 16: mod_base = OTHER; note = 2'-O-methoxyethyl adenosine
  modified_base 17: mod_base = OTHER; note = 2'-O-methoxyethyl guanosine
  modified_base 18: mod_base = OTHER; note = 2'-O-methoxyethyl thymidine
  modified_base 19: mod_base = OTHER; note = 2'-O-methoxyethyl guanosine
  modified_base 20: mod_base = OTHER; note = 2'-O-methoxyethyl 5-methylcytidine
  misc_feature 1..5: note = RNA
  misc_feature 6..15: note = DNA
  misc_feature 16..20: note = RNA
gcagaggtgaagcgaagtgc

SEQ ID NO: 262 - DNA, 20 bp, synthetic construct
  source 1..20: mol_type = other DNA
  modified_base 1: mod_base = OTHER; note = Locked nucleic acid with guanine base
  modified_base 2: mod_base = OTHER; note = Locked nucleic acid with cytosine base
  modified_base 3: mod_base = OTHER; note = 2'-O-methoxyethyl adenosine
  modified_base 4: mod_base = OTHER; note = Locked nucleic acid with guanine base
  modified_base 5: mod_base = OTHER; note = 2'-O-methoxyethyl adenosine
  modified_base 13: mod_base = OTHER; note = 2'-deoxy 5-methylcytidine
  modified_base 16: mod_base = OTHER; note = 2'-O-methoxyethyl adenosine
  modified_base 17: mod_base = OTHER; note = 2'-O-methoxyethyl guanosine
  modified_base 18: mod_base = OTHER; note = 2'-O-methoxyethyl thymidine
  modified_base 19: mod_base = OTHER; note = 2'-O-methoxyethyl guanosine
  modified_base 20: mod_base = OTHER; note = 2'-O-methoxyethyl 5-methylcytidine
  misc_feature 1..5: note = RNA
  misc_feature 6..15: note = DNA
  misc_feature 16..20: note = RNA
gcagaggtgaagcgaagtgc

SEQ ID NO: 263 - DNA, 20 bp, synthetic construct
  source 1..20: mol_type = other DNA
  modified_base 1: mod_base = OTHER; note = Locked nucleic acid with guanine base
  modified_base 2: mod_base = OTHER; note = Locked nucleic acid with cytosine base
  modified_base 3: mod_base = OTHER; note = 2'-O-methoxyethyl adenosine
  modified_base 4: mod_base = OTHER; note = 2'-O-methoxyethyl guanosine
  modified_base 5: mod_base = OTHER; note = Locked nucleic acid with adenine base
  modified_base 13: mod_base = OTHER; note = 2'-deoxy 5-methylcytidine
  modified_base 16: mod_base = OTHER; note = 2'-O-methoxyethyl adenosine
  modified_base 17: mod_base = OTHER; note = 2'-O-methoxyethyl guanosine
  modified_base 18: mod_base = OTHER; note = 2'-O-methoxyethyl thymidine
  modified_base 19: mod_base = OTHER; note = 2'-O-methoxyethyl guanosine
  modified_base 20: mod_base = OTHER; note = 2'-O-methoxyethyl 5-methylcytidine
  misc_feature 1..5: note = RNA
  misc_feature 6..15: note = DNA
  misc_feature 16..20: note = RNA
gcagaggtgaagcgaagtgc

SEQ ID NO: 264 - DNA, 20 bp, synthetic construct
  source 1..20: mol_type = other DNA
  modified_base 1: mod_base = OTHER; note = Locked nucleic acid with guanine base
  modified_base 2: mod_base = OTHER; note = 2'-O-methoxyethyl 5-methylcytidine
  modified_base 3: mod_base = OTHER; note = Locked nucleic acid with adenine base
  modified_base 4: mod_base = OTHER; note = Locked nucleic acid with guanine base
  modified_base 5: mod_base = OTHER; note = 2'-O-methoxyethyl adenosine
  modified_base 13: mod_base = OTHER; note = 2'-deoxy 5-methylcytidine
  modified_base 16: mod_base = OTHER; note = 2'-O-methoxyethyl adenosine
  modified_base 17: mod_base = OTHER; note = 2'-O-methoxyethyl guanosine
  modified_base 18: mod_base = OTHER; note = 2'-O-methoxyethyl thymidine
  modified_base 19: mod_base = OTHER; note = 2'-O-methoxyethyl guanosine
  modified_base 20: mod_base = OTHER; note = 2'-O-methoxyethyl 5-methylcytidine
  misc_feature 1..5: note = RNA
  misc_feature 6..15: note = DNA
  misc_feature 16..20: note = RNA
gcagaggtgaagcgaagtgc

SEQ ID NO: 265 - DNA, 20 bp, synthetic construct
  source 1..20: mol_type = other DNA
  modified_base 1: mod_base = OTHER; note = Locked nucleic acid with guanine base
  modified_base 2: mod_base = OTHER; note = 2'-O-methoxyethyl 5-methylcytidine
  modified_base 3: mod_base = OTHER; note = Locked nucleic acid with adenine base
  modified_base 4: mod_base = OTHER; note = 2'-O-methoxyethyl guanosine
  modified_base 5: mod_base = OTHER; note = Locked nucleic acid with adenine base
  modified_base 13: mod_base = OTHER; note = 2'-deoxy 5-methylcytidine
  modified_base 16: mod_base = OTHER; note = 2'-O-methoxyethyl adenosine
  modified_base 17: mod_base = OTHER; note = 2'-O-methoxyethyl guanosine
  modified_base 18: mod_base = OTHER; note = 2'-O-methoxyethyl thymidine
  modified_base 19: mod_base = OTHER; note = 2'-O-methoxyethyl guanosine
  modified_base 20: mod_base = OTHER; note = 2'-O-methoxyethyl 5-methylcytidine
  misc_feature 1..5: note = RNA
  misc_feature 6..15: note = DNA
  misc_feature 16..20: note = RNA
gcagaggtgaagcgaagtgc

SEQ ID NO: 266 - DNA, 20 bp, synthetic construct
  source 1..20: mol_type = other DNA
  modified_base 1: mod_base = OTHER; note = Locked nucleic acid with guanine base
  modified_base 2: mod_base = OTHER; note = 2'-O-methoxyethyl 5-methylcytidine
  modified_base 3: mod_base = OTHER; note = 2'-O-methoxyethyl adenosine
  modified_base 4: mod_base = OTHER; note = Locked nucleic acid with guanine base
  modified_base 5: mod_base = OTHER; note = Locked nucleic acid with adenine base
  modified_base 13: mod_base = OTHER; note = 2'-deoxy 5-methylcytidine
  modified_base 16: mod_base = OTHER; note = 2'-O-methoxyethyl adenosine
  modified_base 17: mod_base = OTHER; note = 2'-O-methoxyethyl guanosine
  modified_base 18: mod_base = OTHER; note = 2'-O-methoxyethyl thymidine
  modified_base 19: mod_base = OTHER; note = 2'-O-methoxyethyl guanosine
  modified_base 20: mod_base = OTHER; note = 2'-O-methoxyethyl 5-methylcytidine
  misc_feature 1..5: note = RNA
  misc_feature 6..15: note = DNA
  misc_feature 16..20: note = RNA
gcagaggtgaagcgaagtgc

SEQ ID NO: 267 - DNA, 20 bp, synthetic construct
  source 1..20: mol_type = other DNA
  modified_base 1: mod_base = OTHER; note = 2'-O-methoxyethyl guanosine
  modified_base 2: mod_base = OTHER; note = Locked nucleic acid with cytosine base
  modified_base 3: mod_base = OTHER; note = Locked nucleic acid with adenine base
  modified_base 4: mod_base = OTHER; note = Locked nucleic acid with guanine base
  modified_base 5: mod_base = OTHER; note = 2'-O-methoxyethyl adenosine
  modified_base 13: mod_base = OTHER; note = 2'-deoxy 5-methylcytidine
  modified_base 16: mod_base = OTHER; note = 2'-O-methoxyethyl adenosine
  modified_base 17: mod_base = OTHER; note = 2'-O-methoxyethyl guanosine
  modified_base 18: mod_base = OTHER; note = 2'-O-methoxyethyl thymidine
  modified_base 19: mod_base = OTHER; note = 2'-O-methoxyethyl guanosine
  modified_base 20: mod_base = OTHER; note = 2'-O-methoxyethyl 5-methylcytidine
  misc_feature 1..5: note = RNA
  misc_feature 6..15: note = DNA
  misc_feature 16..20: note = RNA
gcagaggtgaagcgaagtgc

SEQ ID NO: 268 - DNA, 20 bp, synthetic construct
  source 1..20: mol_type = other DNA
  modified_base 1: mod_base = OTHER; note = 2'-O-methoxyethyl guanosine
  modified_base 2: mod_base = OTHER; note = Locked nucleic acid with cytosine base
  modified_base 3: mod_base = OTHER; note = Locked nucleic acid with adenine base
  modified_base 4: mod_base = OTHER; note = 2'-O-methoxyethyl guanosine
  modified_base 5: mod_base = OTHER; note = Locked nucleic acid with adenine base
  modified_base 13: mod_base = OTHER; note = 2'-deoxy 5-methylcytidine
  modified_base 16: mod_base = OTHER; note = 2'-O-methoxyethyl adenosine
  modified_base 17: mod_base = OTHER; note = 2'-O-methoxyethyl guanosine
  modified_base 18: mod_base = OTHER; note = 2'-O-methoxyethyl thymidine
  modified_base 19: mod_base = OTHER; note = 2'-O-methoxyethyl guanosine
  modified_base 20: mod_base = OTHER; note = 2'-O-methoxyethyl 5-methylcytidine
  misc_feature 1..5: note = RNA
  misc_feature 6..15: note = DNA
  misc_feature 16..20: note = RNA
gcagaggtgaagcgaagtgc

SEQ ID NO: 269 - DNA, 20 bp, synthetic construct
  source 1..20: mol_type = other DNA
  modified_base 1: mod_base = OTHER; note = 2'-O-methoxyethyl guanosine
  modified_base 2: mod_base = OTHER; note = Locked nucleic acid with cytosine base
  modified_base 3: mod_base = OTHER; note = 2'-O-methoxyethyl adenosine
  modified_base 4: mod_base = OTHER; note = Locked nucleic acid with guanine base
  modified_base 5: mod_base = OTHER; note = Locked nucleic acid with adenine base
  modified_base 13: mod_base = OTHER; note = 2'-deoxy 5-methylcytidine
  modified_base 16: mod_base = OTHER; note = 2'-O-methoxyethyl adenosine
  modified_base 17: mod_base = OTHER; note = 2'-O-methoxyethyl guanosine
  modified_base 18: mod_base = OTHER; note = 2'-O-methoxyethyl thymidine
  modified_base 19: mod_base = OTHER; note = 2'-O-methoxyethyl guanosine
  modified_base 20: mod_base = OTHER; note = 2'-O-methoxyethyl 5-methylcytidine
  misc_feature 1..5: note = RNA
  misc_feature 6..15: note = DNA
  misc_feature 16..20: note = RNA
gcagaggtgaagcgaagtgc

SEQ ID NO: 270 - DNA, 20 bp, synthetic construct
  source 1..20: mol_type = other DNA
  modified_base 1: mod_base = OTHER; note = 2'-O-methoxyethyl guanosine
  modified_base 2: mod_base = OTHER; note = 2'-O-methoxyethyl 5-methylcytidine
  modified_base 3: mod_base = OTHER; note = Locked nucleic acid with adenine base
  modified_base 4: mod_base = OTHER; note = Locked nucleic acid with guanine base
  modified_base 5: mod_base = OTHER; note = Locked nucleic acid with adenine base
  modified_base 13: mod_base = OTHER; note = 2'-deoxy 5-methylcytidine
  modified_base 16: mod_base = OTHER; note = 2'-O-methoxyethyl adenosine
  modified_base 17: mod_base = OTHER; note = 2'-O-methoxyethyl guanosine
  modified_base 18: mod_base = OTHER; note = 2'-O-methoxyethyl thymidine
  modified_base 19: mod_base = OTHER; note = 2'-O-methoxyethyl guanosine
  modified_base 20: mod_base = OTHER; note = 2'-O-methoxyethyl 5-methylcytidine
  misc_feature 1..5: note = RNA
  misc_feature 6..15: note = DNA
  misc_feature 16..20: note = RNA
gcagaggtgaagcgaagtgc

SEQ ID NO: 271 - DNA, 20 bp, synthetic construct
  source 1..20: mol_type = other DNA
  modified_base 1: mod_base = OTHER; note = 2'-O-methoxyethyl guanosine
  modified_base 2: mod_base = OTHER; note = 2'-deoxy 5-methylcytidine
  modified_base 3: mod_base = OTHER; note = 2'-O-methoxyethyl adenosine
  modified_base 4: mod_base = OTHER; note = 2'-O-methoxyethyl guanosine
  modified_base 5: mod_base = OTHER; note = 2'-O-methoxyethyl adenosine
  modified_base 6: mod_base = OTHER; note = 2'-O-methyl guanosine
  modified_base 11: mod_base = OTHER; note = 2'-O-methyl adenosine
  modified_base 13: mod_base = OTHER; note = 2'-deoxy 5-methylcytidine
  modified_base 16: mod_base = OTHER; note = 2'-O-methoxyethyl adenosine
  modified_base 17: mod_base = OTHER; note = 2'-O-methoxyethyl guanosine
  modified_base 18: mod_base = OTHER; note = 2'-O-methoxyethyl thymidine
  modified_base 19: mod_base = OTHER; note = 2'-O-methoxyethyl guanosine
  modified_base 20: mod_base = OTHER; note = 2'-O-methoxyethyl 5-methylcytidine
  misc_feature 1: note = RNA
  misc_feature 2: note = DNA
  misc_feature 3..6: note = RNA
  misc_feature 7..10: note = DNA
  misc_feature 11: note = RNA
  misc_feature 12..15: note = DNA
  misc_feature 16..20: note = RNA
gcagaggtgaagcgaagtgc

SEQ ID NO: 272 - DNA, 20 bp, synthetic construct
  source 1..20: mol_type = other DNA
  modified_base 1: mod_base = OTHER; note = 2'-O-methoxyethyl guanosine
  modified_base 2: mod_base = OTHER; note = 2'-deoxy 5-methylcytidine
  modified_base 3: mod_base = OTHER; note = 2'-O-methoxyethyl adenosine
  modified_base 5: mod_base = OTHER; note = 2'-O-methoxyethyl adenosine
  modified_base 6: mod_base = OTHER; note = 2'-O-methyl guanosine
  modified_base 11: mod_base = OTHER; note = 2'-O-methyl adenosine
  modified_base 13: mod_base = OTHER; note = 2'-deoxy 5-methylcytidine
  modified_base 16: mod_base = OTHER; note = 2'-O-methoxyethyl adenosine
  modified_base 17: mod_base = OTHER; note = 2'-O-methoxyethyl guanosine
  modified_base 18: mod_base = OTHER; note = 2'-O-methoxyethyl thymidine
  modified_base 19: mod_base = OTHER; note = 2'-O-methoxyethyl guanosine
  modified_base 20: mod_base = OTHER; note = 2'-O-methoxyethyl 5-methylcytidine
  misc_feature 1: note = RNA
  misc_feature 2: note = DNA
  misc_feature 3: note = RNA
  misc_feature 4: note = DNA
  misc_feature 5..6: note = RNA
  misc_feature 7..10: note = DNA
  misc_feature 11: note = RNA
  misc_feature 12..15: note = DNA
  misc_feature 16..20: note = RNA
gcagaggtgaagcgaagtgc

SEQ ID NO: 273 - DNA, 20 bp, synthetic construct
  source 1..20: mol_type = other DNA
  modified_base 1: mod_base = OTHER; note = 2'-O-methoxyethyl guanosine
  modified_base 2: mod_base = OTHER; note = 2'-deoxy cytidine
  modified_base 3: mod_base = OTHER; note = 2'-O-methoxyethyl adenosine
  modified_base 4: mod_base = OTHER; note = 2'-O-methoxyethyl guanosine
  modified_base 5: mod_base = OTHER; note = 2'-O-methoxyethyl adenosine
  modified_base 6: mod_base = OTHER; note = 2'-O-methyl guanosine
  modified_base 11: mod_base = OTHER; note = 2'-O-methyl adenosine
  modified_base 13: mod_base = OTHER; note = 2'-deoxy 5-methylcytidine
  modified_base 16: mod_base = OTHER; note = 2'-O-methoxyethyl adenosine
  modified_base 17: mod_base = OTHER; note = 2'-O-methoxyethyl guanosine
  modified_base 18: mod_base = OTHER; note = 2'-O-methoxyethyl thymidine
  modified_base 19: mod_base = OTHER; note = 2'-O-methoxyethyl guanosine
  modified_base 20: mod_base = OTHER; note = 2'-O-methoxyethyl 5-methylcytidine
  misc_feature 1: note = RNA
  misc_feature 2: note = DNA
  misc_feature 3..6: note = RNA
  misc_feature 7..10: note = DNA
  misc_feature 11: note = RNA
  misc_feature 12..15: note = DNA
  misc_feature 16..20: note = RNA
gcagaggtgaagcgaagtgc

SEQ ID NO: 274 - DNA, 20 bp, synthetic construct
  source 1..20: mol_type = other DNA
  modified_base 1: mod_base = OTHER; note = 2'-O-methoxyethyl guanosine
  modified_base 2: mod_base = OTHER; note = 2'-deoxy cytidine
  modified_base 3: mod_base = OTHER; note = 2'-O-methoxyethyl adenosine
  modified_base 4: mod_base = OTHER; note = 2'-OH guanosine
  modified_base 5: mod_base = OTHER; note = 2'-O-methoxyethyl adenosine
  modified_base 6: mod_base = OTHER; note = 2'-O-methyl guanosine
  modified_base 11: mod_base = OTHER; note = 2'-O-methyl adenosine
  modified_base 13: mod_base = OTHER; note = 2'-deoxy 5-methylcytidine
  modified_base 16: mod_base = OTHER; note = 2'-O-methoxyethyl adenosine
  modified_base 17: mod_base = OTHER; note = 2'-O-methoxyethyl guanosine
  modified_base 18: mod_base = OTHER; note = 2'-O-methoxyethyl thymidine
  modified_base 19: mod_base = OTHER; note = 2'-O-methoxyethyl guanosine
  modified_base 20: mod_base = OTHER; note = 2'-O-methoxyethyl 5-methylcytidine
  misc_feature 1: note = RNA
  misc_feature 2: note = DNA
  misc_feature 3: note = RNA
  misc_feature 4: note = DNA
  misc_feature 5..6: note = RNA
  misc_feature 7..10: note = DNA
  misc_feature 11: note = RNA
  misc_feature 12..15: note = DNA
  misc_feature 16..20: note = RNA
gcagaggtgaagcgaagtgc

SEQ ID NO: 275 - DNA, 20 bp, synthetic construct
  source 1..20: mol_type = other DNA
  modified_base 1: mod_base = OTHER; note = Locked nucleic acid with guanine base
  modified_base 2: mod_base = OTHER; note = 2'-O-methoxyethyl 5-methylcytidine
  modified_base 3: mod_base = OTHER; note = 2'-O-methoxyethyl adenosine
  modified_base 4: mod_base = OTHER; note = 2'-O-methoxyethyl guanosine
  modified_base 5: mod_base = OTHER; note = 2'-O-methoxyethyl adenosine
  modified_base 6: mod_base = OTHER; note = 2'-O-methyl guanosine
  modified_base 11: mod_base = OTHER; note = 2'-O-methyl adenosine
  modified_base 13: mod_base = OTHER; note = 2'-deoxy 5-methylcytidine
  modified_base 16: mod_base = OTHER; note = 2'-O-methoxyethyl adenosine
  modified_base 17: mod_base = OTHER; note = 2'-O-methoxyethyl guanosine
  modified_base 18: mod_base = OTHER; note = 2'-O-methoxyethyl thymidine
  modified_base 19: mod_base = OTHER; note = 2'-O-methoxyethyl guanosine
  modified_base 20: mod_base = OTHER; note = 2'-O-methoxyethyl 5-methylcytidine
  misc_feature 1..6: note = RNA
  misc_feature 7..10: note = DNA
  misc_feature 11: note = RNA
  misc_feature 12..15: note = DNA
  misc_feature 16..20: note = RNA
gcagaggtgaagcgaagtgc

SEQ ID NO: 276 - DNA, 20 bp, synthetic construct
  source 1..20: mol_type = other DNA
  modified_base 1: mod_base = OTHER; note = 2'-O-methoxyethyl guanosine
  modified_base 2: mod_base = OTHER; note = Locked nucleic acid with cytosine base
  modified_base 3: mod_base = OTHER; note = 2'-O-methoxyethyl adenosine
  modified_base 4: mod_base = OTHER; note = 2'-O-methyl guanosine
  modified_base 5: mod_base = OTHER; note = 2'-O-methoxyethyl adenosine
  modified_base 6: mod_base = OTHER; note = 2'-O-methyl guanosine
  modified_base 11: mod_base = OTHER; note = 2'-O-methyl adenosine
  modified_base 13: mod_base = OTHER; note = 2'-deoxy 5-methylcytidine
  modified_base 16: mod_base = OTHER; note = 2'-O-methoxyethyl adenosine
  modified_base 17: mod_base = OTHER; note = 2'-O-methoxyethyl guanosine
  modified_base 18: mod_base = OTHER; note = 2'-O-methoxyethyl thymidine
  modified_base 19: mod_base = OTHER; note = 2'-O-methoxyethyl guanosine
  modified_base 20: mod_base = OTHER; note = 2'-O-methoxyethyl 5-methylcytidine
  misc_feature 1..6: note = RNA
  misc_feature 7..10: note = DNA
  misc_feature 11: note = RNA
  misc_feature 12..15: note = DNA
  misc_feature 16..20: note = RNA
gcagaggtgaagcgaagtgc

SEQ ID NO: 277 - DNA, 20 bp, synthetic construct
  source 1..20: mol_type = other DNA
  modified_base 1: mod_base = OTHER; note = 2'-O-methoxyethyl guanosine
  modified_base 2: mod_base = OTHER; note = 2'-O-methoxyethyl 5-methylcytidine
  modified_base 3: mod_base = OTHER; note = Locked nucleic acid with adenine base
  modified_base 4: mod_base = OTHER; note = 2'-O-methoxyethyl guanosine
  modified_base 5: mod_base = OTHER; note = 2'-O-methoxyethyl adenosine
  modified_base 6: mod_base = OTHER; note = 2'-O-methyl guanosine
  modified_base 11: mod_base = OTHER; note = 2'-O-methyl adenosine
  modified_base 13: mod_base = OTHER; note = 2'-deoxy 5-methylcytidine
  modified_base 16: mod_base = OTHER; note = 2'-O-methoxyethyl adenosine
  modified_base 17: mod_base = OTHER; note = 2'-O-methoxyethyl guanosine
  modified_base 18: mod_base = OTHER; note = 2'-O-methoxyethyl thymidine
  modified_base 19: mod_base = OTHER; note = 2'-O-methoxyethyl guanosine
  modified_base 20: mod_base = OTHER; note = 2'-O-methoxyethyl 5-methylcytidine
  misc_feature 1..6: note = RNA
  misc_feature 7..10: note = DNA
  misc_feature 11: note = RNA
  misc_feature 12..15: note = DNA
  misc_feature 16..20: note = RNA
gcagaggtgaagcgaagtgc

SEQ ID NO: 278 - DNA, 20 bp, synthetic construct
  source 1..20: mol_type = other DNA
  modified_base 1: mod_base = OTHER; note = 2'-O-methoxyethyl guanosine
  modified_base 2: mod_base = OTHER; note = 2'-O-methoxyethyl 5-methylcytidine
  modified_base 3: mod_base = OTHER; note = 2'-O-methoxyethyl adenosine
  modified_base 4: mod_base = OTHER; note = Locked nucleic acid with guanine base
  modified_base 5: mod_base = OTHER; note = 2'-O-methoxyethyl adenosine
  modified_base 6: mod_base = OTHER; note = 2'-O-methyl guanosine
  modified_base 11: mod_base = OTHER; note = 2'-O-methyl adenosine
  modified_base 13: mod_base = OTHER; note = 2'-deoxy 5-methylcytidine
  modified_base 16: mod_base = OTHER; note = 2'-O-methoxyethyl adenosine
  modified_base 17: mod_base = OTHER; note = 2'-O-methoxyethyl guanosine
  modified_base 18: mod_base = OTHER; note = 2'-O-methoxyethyl thymidine
  modified_base 19: mod_base = OTHER; note = 2'-O-methoxyethyl guanosine
  modified_base 20: mod_base = OTHER; note = 2'-O-methoxyethyl 5-methylcytidine
  misc_feature 1..6: note = RNA
  misc_feature 7..10: note = DNA
  misc_feature 11: note = RNA
  misc_feature 12..15: note = DNA
  misc_feature 16..20: note = RNA
gcagaggtgaagcgaagtgc

SEQ ID NO: 279 - DNA, 20 bp, synthetic construct
  source 1..20: mol_type = other DNA
  modified_base 1: mod_base = OTHER; note = 2'-O-methoxyethyl guanosine
  modified_base 2: mod_base = OTHER; note = 2'-O-methoxyethyl 5-methylcytidine
  modified_base 3: mod_base = OTHER; note = 2'-O-methoxyethyl adenosine
  modified_base 4: mod_base = OTHER; note = 2'-O-methoxyethyl guanosine
  modified_base 5: mod_base = OTHER; note = Locked nucleic acid with adenine base
  modified_base 6: mod_base = OTHER; note = 2'-O-methyl guanosine
  modified_base 11: mod_base = OTHER; note = 2'-O-methyl adenosine
  modified_base 13: mod_base = OTHER; note = 2'-deoxy 5-methylcytidine
  modified_base 16: mod_base = OTHER; note = 2'-O-methoxyethyl adenosine
  modified_base 17: mod_base = OTHER; note = 2'-O-methoxyethyl guanosine
  modified_base 18: mod_base = OTHER; note = 2'-O-methoxyethyl thymidine
  modified_base 19: mod_base = OTHER; note = 2'-O-methoxyethyl guanosine
  modified_base 20: mod_base = OTHER; note = 2'-O-methoxyethyl 5-methylcytidine
  misc_feature 1..6: note = RNA
  misc_feature 7..10: note = DNA
  misc_feature 11: note = RNA
  misc_feature 12..15: note = DNA
  misc_feature 16..20: note = RNA
gcagaggtgaagcgaagtgc

SEQ ID NO: 280 - DNA, 20 bp, synthetic construct
  source 1..20: mol_type = other DNA
  modified_base 1: mod_base = OTHER; note = Locked nucleic acid with guanine base
  modified_base 2: mod_base = OTHER; note = 2'-deoxy 5-methylcytidine
  modified_base 3: mod_base = OTHER; note = 2'-O-methoxyethyl adenosine
  modified_base 4: mod_base = OTHER; note = 2'-O-methoxyethyl guanosine
  modified_base 5: mod_base = OTHER; note = 2'-O-methoxyethyl adenosine
  modified_base 6: mod_base = OTHER; note = 2'-O-methyl guanosine
  modified_base 11: mod_base = OTHER; note = 2'-O-methyl adenosine
  modified_base 13: mod_base = OTHER; note = 2'-deoxy 5-methylcytidine
  modified_base 16: mod_base = OTHER; note = 2'-O-methoxyethyl adenosine
  modified_base 17: mod_base = OTHER; note = 2'-O-methoxyethyl guanosine
  modified_base 18: mod_base = OTHER; note = 2'-O-methoxyethyl thymidine
  modified_base 19: mod_base = OTHER; note = 2'-O-methoxyethyl guanosine
  modified_base 20: mod_base = OTHER; note = 2'-O-methoxyethyl 5-methylcytidine
  misc_feature 1: note = RNA
  misc_feature 2: note = DNA
  misc_feature 3..6: note = RNA
  misc_feature 7..10: note = DNA
  misc_feature 11: note = RNA
  misc_feature 12..15: note = DNA
  misc_feature 16..20: note = RNA
gcagaggtgaagcgaagtgc

SEQ ID NO: 281 - DNA, 20 bp, synthetic construct
  source 1..20: mol_type = other DNA
  modified_base 1: mod_base = OTHER; note = 2'-O-methoxyethyl guanosine
  modified_base 2: mod_base = OTHER; note = 2'-deoxy 5-methylcytidine
  modified_base 3: mod_base = OTHER; note = Locked nucleic acid with adenine base
  modified_base 4: mod_base = OTHER; note = 2'-O-methoxyethyl guanosine
  modified_base 5: mod_base = OTHER; note = 2'-O-methoxyethyl adenosine
  modified_base 6: mod_base = OTHER; note = 2'-O-methyl guanosine
  modified_base 11: mod_base = OTHER; note = 2'-O-methyl adenosine
  modified_base 13: mod_base = OTHER; note = 2'-deoxy 5-methylcytidine
  modified_base 16: mod_base = OTHER; note = 2'-O-methoxyethyl adenosine
  modified_base 17: mod_base = OTHER; note = 2'-O-methoxyethyl guanosine
  modified_base 18: mod_base = OTHER; note = 2'-O-methoxyethyl thymidine
  modified_base 19: mod_base = OTHER; note = 2'-O-methoxyethyl guanosine
  modified_base 20: mod_base = OTHER; note = 2'-O-methoxyethyl 5-methylcytidine
  misc_feature 1: note = RNA
  misc_feature 2: note = DNA
  misc_feature 3..6: note = RNA
  misc_feature 7..10: note = DNA
  misc_feature 11: note = RNA
  misc_feature 12..15: note = DNA
  misc_feature 16..20: note = RNA
gcagaggtgaagcgaagtgc

SEQ ID NO: 282 - DNA, 20 bp, synthetic construct
  source 1..20: mol_type = other DNA
  modified_base 1: mod_base = OTHER; note = 2'-O-methoxyethyl guanosine
  modified_base 2: mod_base = OTHER; note = 2'-deoxy 5-methylcytidine
  modified_base 3: mod_base = OTHER; note = 2'-O-methoxyethyl adenosine
  modified_base 4: mod_base = OTHER; note = Locked nucleic acid with guanine base
  modified_base 5: mod_base = OTHER; note = 2'-O-methoxyethyl adenosine
  modified_base 6: mod_base = OTHER; note = 2'-O-methyl guanosine
  modified_base 11: mod_base = OTHER; note = 2'-O-methyl adenosine
  modified_base 13: mod_base = OTHER; note = 2'-deoxy 5-methylcytidine
  modified_base 16: mod_base = OTHER; note = 2'-O-methoxyethyl adenosine
  modified_base 17: mod_base = OTHER; note = 2'-O-methoxyethyl guanosine
  modified_base 18: mod_base = OTHER; note = 2'-O-methoxyethyl thymidine
  modified_base 19: mod_base = OTHER; note = 2'-O-methoxyethyl guanosine
  modified_base 20: mod_base = OTHER; note = 2'-O-methoxyethyl 5-methylcytidine
  misc_feature 1: note = RNA
  misc_feature 2: note = DNA
  misc_feature 3..6: note = RNA
  misc_feature 7..10: note = DNA
  misc_feature 11: note = RNA
  misc_feature 12..15: note = DNA
  misc_feature 16..20: note = RNA
gcagaggtgaagcgaagtgc

SEQ ID NO: 283 - DNA, 20 bp, synthetic construct
  source 1..20: mol_type = other DNA
  modified_base 1: mod_base = OTHER; note = 2'-O-methoxyethyl guanosine
  modified_base 2: mod_base = OTHER; note = 2'-deoxy 5-methylcytidine
  modified_base 3: mod_base = OTHER; note = 2'-O-methoxyethyl adenosine
  modified_base 4: mod_base = OTHER; note = 2'-O-methoxyethyl guanosine
  modified_base 5: mod_base = OTHER; note = Locked nucleic acid with adenine base
  modified_base 6: mod_base = OTHER; note = 2'-O-methyl guanosine
  modified_base 11: mod_base = OTHER; note = 2'-O-methyl adenosine
  modified_base 13: mod_base = OTHER; note = 2'-deoxy 5-methylcytidine
  modified_base 16: mod_base = OTHER; note = 2'-O-methoxyethyl adenosine
  modified_base 17: mod_base = OTHER; note = 2'-O-methoxyethyl guanosine
  modified_base 18: mod_base = OTHER; note = 2'-O-methoxyethyl thymidine
  modified_base 19: mod_base = OTHER; note = 2'-O-methoxyethyl guanosine
  modified_base 20: mod_base = OTHER; note = 2'-O-methoxyethyl 5-methylcytidine
  misc_feature 1: note = RNA
  misc_feature 2: note = DNA
  misc_feature 3..6: note = RNA
  misc_feature 7..10: note = DNA
  misc_feature 11: note = RNA
  misc_feature 12..15: note = DNA
  misc_feature 16..20: note = RNA
gcagaggtgaagcgaagtgc

SEQ ID NO: 284 - DNA, 20 bp, synthetic construct
  source 1..20: mol_type = other DNA
  modified_base 1: mod_base = OTHER; note = Locked nucleic acid with guanine base
  modified_base 2: mod_base = OTHER; note = 2'-deoxy 5-methylcytidine
  modified_base 3: mod_base = OTHER; note = 2'-O-methoxyethyl adenosine
  modified_base 5: mod_base = OTHER; note = 2'-O-methoxyethyl adenosine
  modified_base 6: mod_base = OTHER; note = 2'-O-methyl guanosine
  modified_base 11: mod_base = OTHER; note = 2'-O-methyl adenosine
  modified_base 13: mod_base = OTHER; note = 2'-deoxy 5-methylcytidine
  modified_base 16: mod_base = OTHER; note = 2'-O-methoxyethyl adenosine
  modified_base 17: mod_base = OTHER; note = 2'-O-methoxyethyl guanosine
  modified_base 18: mod_base = OTHER; note = 2'-O-methoxyethyl thymidine
  modified_base 19: mod_base = OTHER; note = 2'-O-methoxyethyl guanosine
  modified_base 20: mod_base = OTHER; note = 2'-O-methoxyethyl 5-methylcytidine
  misc_feature 1: note = RNA
  misc_feature 2: note = DNA
  misc_feature 3: note = RNA
  misc_feature 4: note = DNA
  misc_feature 5..6: note = RNA
  misc_feature 7..10: note = DNA
  misc_feature 11: note = RNA
  misc_feature 12..15: note = DNA
  misc_feature 16..20: note = RNA
gcagaggtgaagcgaagtgc

SEQ ID NO: 285 - DNA, 20 bp, synthetic construct
  source 1..20: mol_type = other DNA
  modified_base 1: mod_base = OTHER; note = 2'-O-methoxyethyl guanosine
  modified_base 2: mod_base = OTHER; note = 2'-deoxy 5-methylcytidine
  modified_base 3: mod_base = OTHER; note = Locked nucleic acid with adenine base
  modified_base 5: mod_base = OTHER; note = 2'-O-methoxyethyl adenosine
  modified_base 6: mod_base = OTHER; note = 2'-O-methyl guanosine
  modified_base 11: mod_base = OTHER; note = 2'-O-methyl adenosine
  modified_base 13: mod_base = OTHER; note = 2'-deoxy 5-methylcytidine
  modified_base 16: mod_base = OTHER; note = 2'-O-methoxyethyl adenosine
  modified_base 17: mod_base = OTHER; note = 2'-O-methoxyethyl guanosine
  modified_base 18: mod_base = OTHER; note = 2'-O-methoxyethyl thymidine
  modified_base 19: mod_base = OTHER; note = 2'-O-methoxyethyl guanosine
  modified_base 20: mod_base = OTHER; note = 2'-O-methoxyethyl 5-methylcytidine
  misc_feature 1: note = RNA
  misc_feature 2: note = DNA
  misc_feature 3: note = RNA
  misc_feature 4: note = DNA
  misc_feature 5..6: note = RNA
  misc_feature 7..10: note = DNA
  misc_feature 11: note = RNA
  misc_feature 12..15: note = DNA
  misc_feature 16..20: note = RNA
gcagaggtgaagcgaagtgc

SEQ ID NO: 286 - DNA, 20 bp, synthetic construct
  source 1..20: mol_type = other DNA
  modified_base 1: mod_base = OTHER; note = 2'-O-methoxyethyl guanosine
  modified_base 2: mod_base = OTHER; note = 2'-deoxy 5-methylcytidine
  modified_base 3: mod_base = OTHER; note = 2'-O-methoxyethyl adenosine
  modified_base 5: mod_base = OTHER; note = Locked nucleic acid with adenine base
  modified_base 6: mod_base = OTHER; note = 2'-O-methyl guanosine
  modified_base 11: mod_base = OTHER; note = 2'-O-methyl adenosine
  modified_base 13: mod_base = OTHER; note = 2'-deoxy 5-methylcytidine
  modified_base 16: mod_base = OTHER; note = 2'-O-methoxyethyl adenosine
  modified_base 17: mod_base = OTHER; note = 2'-O-methoxyethyl guanosine
  modified_base 18: mod_base = OTHER; note = 2'-O-methoxyethyl thymidine
  modified_base 19: mod_base = OTHER; note = 2'-O-methoxyethyl guanosine
  modified_base 20: mod_base = OTHER; note = 2'-O-methoxyethyl 5-methylcytidine
  misc_feature 1: note = RNA
  misc_feature 2: note = DNA
  misc_feature 3: note = RNA
  misc_feature 4: note = DNA
  misc_feature 5..6: note = RNA
  misc_feature 7..10: note = DNA
  misc_feature 11: note = RNA
  misc_feature 12..15: note = DNA
  misc_feature 16..20: note = RNA
gcagaggtgaagcgaagtgc

SEQ ID NO: 287 - DNA, 20 bp, synthetic construct
  source 1..20: mol_type = other DNA
  modified_base 1: mod_base = OTHER; note = Locked nucleic acid with guanine base
  modified_base 2: mod_base = OTHER; note = 2'-deoxy 5-methylcytidine
  modified_base 3: mod_base = OTHER; note = 2'-O-methoxyethyl adenosine
  modified_base 4: mod_base = OTHER; note = 2'-O-methoxyethyl guanosine
  modified_base 5: mod_base = OTHER; note = 2'-O-methoxyethyl adenosine
  modified_base 10: mod_base = OTHER; note = 2'-O-methyl adenosine
  modified_base 13: mod_base = OTHER; note = 2'-deoxy 5-methylcytidine
  modified_base 15: mod_base = OTHER; note = 2'-O-methyl adenosine
  modified_base 16: mod_base = OTHER; note = 2'-O-methoxyethyl adenosine
  modified_base 17: mod_base = OTHER; note = 2'-O-methoxyethyl guanosine
  modified_base 18: mod_base = OTHER; note = 2'-O-methoxyethyl thymidine
  modified_base 19: mod_base = OTHER; note = 2'-O-methoxyethyl guanosine
  modified_base 20: mod_base = OTHER; note = 2'-O-methoxyethyl 5-methylcytidine
  misc_feature 1: note = RNA
  misc_feature 2: note = DNA
  misc_feature 3..5: note = RNA
  misc_feature 6..9: note = DNA
  misc_feature 10: note = RNA
  misc_feature 11..14: note = DNA
  misc_feature 15..20: note = RNA
gcagaggtgaagcgaagtgc

SEQ ID NO: 288 - DNA, 20 bp, synthetic construct
  source 1..20: mol_type = other DNA
  modified_base 1: mod_base = OTHER; note = 2'-O-methoxyethyl guanosine
  modified_base 2: mod_base = OTHER; note = 2'-deoxy 5-methylcytidine
  modified_base 3: mod_base = OTHER; note = Locked nucleic acid with adenine base
  modified_base 4: mod_base = OTHER; note = 2'-O-methoxyethyl guanosine
  modified_base 5: mod_base = OTHER; note = 2'-O-methoxyethyl adenosine
  modified_base 10: mod_base = OTHER; note = 2'-O-methyl adenosine
  modified_base 13: mod_base = OTHER; note = 2'-deoxy 5-methylcytidine
  modified_base 15: mod_base = OTHER; note = 2'-O-methyl adenosine
  modified_base 16: mod_base = OTHER; note = 2'-O-methoxyethyl adenosine
  modified_base 17: mod_base = OTHER; note = 2'-O-methoxyethyl guanosine
  modified_base 18: mod_base = OTHER; note = 2'-O-methoxyethyl thymidine
  modified_base 19: mod_base = OTHER; note = 2'-O-methoxyethyl guanosine
  modified_base 20: mod_base = OTHER; note = 2'-O-methoxyethyl 5-methylcytidine
  misc_feature 1: note = RNA
  misc_feature 2: note = DNA
  misc_feature 3..5: note = RNA
  misc_feature 6..9: note = DNA
  misc_feature 10: note = RNA
  misc_feature 11..14: note = DNA
  misc_feature 15..20: note = RNA
gcagaggtgaagcgaagtgc

SEQ ID NO: 289 - DNA, 20 bp, synthetic construct
  source 1..20: mol_type = other DNA
  modified_base 1: mod_base = OTHER; note = 2'-O-methoxyethyl guanosine
  modified_base 2: mod_base = OTHER; note = 2'-deoxy 5-methylcytidine
  modified_base 3: mod_base = OTHER; note = 2'-O-methoxyethyl adenosine
  modified_base 4: mod_base = OTHER; note = Locked nucleic acid with guanine base
  modified_base 5: mod_base = OTHER; note = 2'-O-methoxyethyl adenosine
  modified_base 10: mod_base = OTHER; note = 2'-O-methyl adenosine
  modified_base 13: mod_base = OTHER; note = 2'-deoxy 5-methylcytidine
  modified_base 15: mod_base = OTHER; note = 2'-O-methyl adenosine
  modified_base 16: mod_base = OTHER; note = 2'-O-methoxyethyl adenosine
  modified_base 17: mod_base = OTHER; note = 2'-O-methoxyethyl guanosine
  modified_base 18: mod_base = OTHER; note = 2'-O-methoxyethyl thymidine
  modified_base 19: mod_base = OTHER; note = 2'-O-methoxyethyl guanosine
  modified_base 20: mod_base = OTHER; note = 2'-O-methoxyethyl 5-methylcytidine
  misc_feature 1: note = RNA
  misc_feature 2: note = DNA
  misc_feature 3..5: note = RNA
  misc_feature 6..9: note = DNA
  misc_feature 10: note = RNA
  misc_feature 11..14: note = DNA
  misc_feature 15..20: note = RNA
gcagaggtgaagcgaagtgc

SEQ ID NO: 290 - DNA, 20 bp, synthetic construct
  source 1..20: mol_type = other DNA
  modified_base 1: mod_base = OTHER; note = 2'-O-methoxyethyl guanosine
  modified_base 2: mod_base = OTHER; note = 2'-deoxy 5-methylcytidine
  modified_base 3: mod_base = OTHER; note = 2'-O-methoxyethyl adenosine
  modified_base 4: mod_base = OTHER; note = 2'-O-methoxyethyl guanosine
  modified_base 5: mod_base = OTHER; note = Locked nucleic acid with adenine base
  modified_base 10: mod_base = OTHER; note = 2'-O-methyl adenosine
  modified_base 13: mod_base = OTHER; note = 2'-deoxy 5-methylcytidine
  modified_base 15: mod_base = OTHER; note = 2'-O-methyl adenosine
  modified_base 16: mod_base = OTHER; note = 2'-O-methoxyethyl adenosine
  modified_base 17: mod_base = OTHER; note = 2'-O-methoxyethyl guanosine
  modified_base 18: mod_base = OTHER; note = 2'-O-methoxyethyl thymidine
  modified_base 19: mod_base = OTHER; note = 2'-O-methoxyethyl guanosine
  modified_base 20: mod_base = OTHER; note = 2'-O-methoxyethyl 5-methylcytidine
  misc_feature 1: note = RNA
  misc_feature 2: note = DNA
  misc_feature 3..5: note = RNA
  misc_feature 6..9: note = DNA
  misc_feature 10: note = RNA
  misc_feature 11..14: note = DNA
  misc_feature 15..20: note = RNA
gcagaggtgaagcgaagtgc

SEQ ID NO: 291 - DNA, 20 bp, synthetic construct
  source 1..20: mol_type = other DNA
  modified_base 1: mod_base = OTHER; note = Locked nucleic acid with guanine base
  modified_base 2: mod_base = OTHER; note = 2'-deoxy 5-methylcytidine
  modified_base 3: mod_base = OTHER; note = 2'-O-methoxyethyl adenosine
  modified_base 5: mod_base = OTHER; note = 2'-O-methoxyethyl adenosine
  modified_base 10: mod_base = OTHER; note = 2'-O-methyl adenosine
  modified_base 13: mod_base = OTHER; note = 2'-deoxy 5-methylcytidine
  modified_base 15: mod_base = OTHER; note = 2'-O-methyl adenosine
  modified_base 16: mod_base = OTHER; note = 2'-O-methoxyethyl adenosine
  modified_base 17: mod_base = OTHER; note = 2'-O-methoxyethyl guanosine
  modified_base 18: mod_base = OTHER; note = 2'-O-methoxyethyl thymidine
  modified_base 19: mod_base = OTHER; note = 2'-O-methoxyethyl guanosine
  modified_base 20: mod_base = OTHER; note = 2'-O-methoxyethyl 5-methylcytidine
  misc_feature 1: note = RNA
  misc_feature 2: note = DNA
  misc_feature 3: note = RNA
  misc_feature 4: note = DNA
  misc_feature 5: note = RNA
  misc_feature 6..9: note = DNA
  misc_feature 10: note = RNA
  misc_feature 11..14: note = DNA
  misc_feature 15..20: note = RNA
gcagaggtgaagcgaagtgc

SEQ ID NO: 292 - DNA, 20 bp, synthetic construct
  source 1..20: mol_type = other DNA
  modified_base 1: mod_base = OTHER; note = 2'-O-methoxyethyl guanosine
  modified_base 2: mod_base = OTHER; note = 2'-deoxy 5-methylcytidine
  modified_base 3: mod_base = OTHER; note = Locked nucleic acid with adenine base
  modified_base 5: mod_base = OTHER; note = 2'-O-methoxyethyl adenosine
  modified_base 10: mod_base = OTHER; note = 2'-O-methyl adenosine
  modified_base 13: mod_base = OTHER; note = 2'-deoxy 5-methylcytidine
  modified_base 15: mod_base = OTHER; note = 2'-O-methyl adenosine
  modified_base 16: mod_base = OTHER; note = 2'-O-methoxyethyl adenosine
  modified_base 17: mod_base = OTHER; note = 2'-O-methoxyethyl guanosine
  modified_base 18: mod_base = OTHER; note = 2'-O-methoxyethyl thymidine
  modified_base 19: mod_base = OTHER; note = 2'-O-methoxyethyl guanosine
  modified_base 20: mod_base = OTHER; note = 2'-O-methoxyethyl 5-methylcytidine
  misc_feature 1: note = RNA
  misc_feature 2: note = DNA
  misc_feature 3: note = RNA
  misc_feature 4: note = DNA
  misc_feature 5: note = RNA
  misc_feature 6..9: note = DNA
  misc_feature 10: note = RNA
  misc_feature 11..14: note = DNA
  misc_feature 15..20: note = RNA
gcagaggtgaagcgaagtgc

SEQ ID NO: 293 - DNA, 20 bp, synthetic construct
  source 1..20: mol_type = other DNA
  modified_base 1: mod_base = OTHER; note = 2'-O-methoxyethyl guanosine
  modified_base 2: mod_base = OTHER; note = 2'-deoxy 5-methylcytidine
  modified_base 3: mod_base = OTHER; note = 2'-O-methoxyethyl adenosine
  modified_base 5: mod_base = OTHER; note = Locked nucleic acid with adenine base
  modified_base 10: mod_base = OTHER; note = 2'-O-methyl adenosine
  modified_base 13: mod_base = OTHER; note = 2'-deoxy 5-methylcytidine
  modified_base 15: mod_base = OTHER; note = 2'-O-methyl adenosine
  modified_base 16: mod_base = OTHER; note = 2'-O-methoxyethyl adenosine
  modified_base 17: mod_base = OTHER; note = 2'-O-methoxyethyl guanosine
  modified_base 18: mod_base = OTHER; note = 2'-O-methoxyethyl thymidine
  modified_base 19: mod_base = OTHER; note = 2'-O-methoxyethyl guanosine
  modified_base 20: mod_base = OTHER; note = 2'-O-methoxyethyl 5-methylcytidine
  misc_feature 1: note = RNA
  misc_feature 2: note = DNA
  misc_feature 3: note = RNA
  misc_feature 4: note = DNA
  misc_feature 5: note = RNA
  misc_feature 6..9: note = DNA
  misc_feature 10: note = RNA
  misc_feature 11..14: note = DNA
  misc_feature 15..20: note = RNA
gcagaggtgaagcgaagtgc

SEQ ID NO: 294 - DNA, 20 bp, synthetic construct
  source 1..20: mol_type = other DNA
  modified_base 1: mod_base = OTHER; note = Locked nucleic acid with guanine base
  modified_base 2: mod_base = OTHER; note = 2'-O-methoxyethyl 5-methylcytidine
  modified_base 3: mod_base = OTHER; note = Locked nucleic acid with adenine base
  modified_base 4: mod_base = OTHER; note = 2'-O-methoxyethyl guanosine
  modified_base 5: mod_base = OTHER; note = 2'-O-methoxyethyl adenosine
  modified_base 10: mod_base = OTHER; note = 2'-O-methoxyethyl adenosine
  modified_base 13: mod_base = OTHER; note = 2'-deoxy 5-methylcytidine
  modified_base 16: mod_base = OTHER; note = 2'-O-methoxyethyl adenosine
  modified_base 17: mod_base = OTHER; note = 2'-O-methoxyethyl guanosine
  modified_base 18: mod_base = OTHER; note = 2'-O-methoxyethyl thymidine
  modified_base 19: mod_base = OTHER; note = 2'-O-methoxyethyl guanosine
  modified_base 20: mod_base = OTHER; note = 2'-O-methoxyethyl 5-methylcytidine
  misc_feature 1..5: note = RNA
  misc_feature 6..9: note = DNA
  misc_feature 10: note = RNA
  misc_feature 11..15: note = DNA
  misc_feature 16..20: note = RNA
gcagaggtgaagcgaagtgc

SEQ ID NO: 295 - DNA, 20 bp, synthetic construct
  source 1..20: mol_type = other DNA
  modified_base 1: mod_base = OTHER; note = Locked nucleic acid with guanine base
  modified_base 2: mod_base = OTHER; note = Locked nucleic acid with 5-methylcytidine base
  modified_base 3: mod_base = OTHER; note = 2'-O-methoxyethyl adenosine
  modified_base 4: mod_base = OTHER; note = 2'-O-methoxyethyl guanosine
  modified_base 5: mod_base = OTHER; note = 2'-O-methoxyethyl adenosine
  modified_base 13: mod_base = OTHER; note = 2'-deoxy 5-methylcytidine
  modified_base 16: mod_base = OTHER; note = 2'-O-methoxyethyl adenosine
  modified_base 17: mod_base = OTHER; note = 2'-O-methoxyethyl guanosine
  modified_base 18: mod_base = OTHER; note = 2'-O-methoxyethyl thymidine
  modified_base 19: mod_base = OTHER; note = 2'-O-methoxyethyl guanosine
  modified_base 20: mod_base = OTHER; note = 2'-O-methoxyethyl 5-methylcytidine
  misc_feature 1..5: note = RNA
  misc_feature 6..15: note = DNA
  misc_feature 16..20: note = RNA
gcagaggtgaagcgaagtgc

SEQ ID NO: 296 - DNA, 20 bp, synthetic construct
  source 1..20: mol_type = other DNA
  modified_base 1: mod_base = OTHER; note = Locked nucleic acid with guanine base
  modified_base 2: mod_base = OTHER; note = 2'-O-methoxyethyl 5-methylcytidine
  modified_base 3: mod_base = OTHER; note = Locked nucleic acid with adenine base
  modified_base 4: mod_base = OTHER; note = 2'-O-methoxyethyl guanosine
  modified_base 5: mod_base = OTHER; note = 2'-O-methoxyethyl adenosine
  modified_base 13: mod_base = OTHER; note = 2'-deoxy 5-methylcytidine
  modified_base 16: mod_base = OTHER; note = 2'-O-methoxyethyl adenosine
  modified_base 17: mod_base = OTHER; note = 2'-O-methoxyethyl guanosine
  modified_base 18: mod_base = OTHER; note = 2'-O-methoxyethyl thymidine
  modified_base 19: mod_base = OTHER; note = 2'-O-methoxyethyl guanosine
  modified_base 20: mod_base = OTHER; note = 2'-O-methoxyethyl 5-methylcytidine
  misc_feature 1..5: note = RNA
  misc_feature 6..15: note = DNA
  misc_feature 16..20: note = RNA
gcagaggtgaagcgaagtgc

SEQ ID NO: 297 - DNA, 20 bp, synthetic construct
  source 1..20: mol_type = other DNA
  modified_base 1: mod_base = OTHER; note = Locked nucleic acid with guanine base
  modified_base 2: mod_base = OTHER; note = 2'-O-methoxyethyl 5-methylcytidine
  modified_base 3: mod_base = OTHER; note = Locked nucleic acid with adenine base
  modified_base 4: mod_base = OTHER; note = 2'-O-methoxyethyl guanosine
  modified_base 5: mod_base = OTHER; note = 2'-O-methoxyethyl adenosine
  modified_base 10: mod_base = OTHER; note = 2'-O-methoxyethyl adenosine
  modified_base 13: mod_base = OTHER; note = 2'-deoxy 5-methylcytidine
  modified_base 16: mod_base = OTHER; note = 2'-O-methoxyethyl adenosine
  modified_base 17: mod_base = OTHER; note = 2'-O-methoxyethyl guanosine
  modified_base 18: mod_base = OTHER; note = 2'-O-methoxyethyl uridine
  modified_base 19: mod_base = OTHER; note = 2'-O-methoxyethyl guanosine
  modified_base 20: mod_base = OTHER; note = 2'-O-methoxyethyl 5-methylcytidine
  misc_feature 1..5: note = RNA
  misc_feature 6..9: note = DNA
  misc_feature 10: note = RNA
  misc_feature 11..15: note = DNA
  misc_feature 16..20: note = RNA
gcagaggtgaagcgaagtgc

SEQ ID NO: 298 - DNA, 20 bp, synthetic construct
  source 1..20: mol_type = other DNA
  modified_base 1: mod_base = OTHER; note = Locked nucleic acid with guanine base
  modified_base 2: mod_base = OTHER; note = 2'-O-methoxyethyl 5-methylcytidine
  modified_base 3: mod_base = OTHER; note = Locked nucleic acid with adenine base
  modified_base 4: mod_base = OTHER; note = 2'-O-methoxyethyl guanosine
  modified_base 5: mod_base = OTHER; note = 2'-O-methoxyethyl adenosine
  modified_base 10: mod_base = OTHER; note = 2'-O-methyl adenosine
  modified_base 13: mod_base = OTHER; note = 2'-deoxy 5-methylcytidine
  modified_base 16: mod_base = OTHER; note = 2'-O-methoxyethyl adenosine
  modified_base 17: mod_base = OTHER; note = 2'-O-methoxyethyl guanosine
  modified_base 18: mod_base = OTHER; note = 2'-O-methoxyethyl uridine
  modified_base 19: mod_base = OTHER; note = 2'-O-methoxyethyl guanosine
  modified_base 20: mod_base = OTHER; note = 2'-O-methoxyethyl 5-methylcytidine
  misc_feature 1..5: note = RNA
  misc_feature 6..9: note = DNA
  misc_feature 10: note = RNA
  misc_feature 11..15: note = DNA
  misc_feature 16..20: note = RNA
gcagaggtgaagcgaagtgc

SEQ ID NO: 299 - DNA, 20 bp, synthetic construct
  source 1..20: mol_type = other DNA
  modified_base 1: mod_base = OTHER; note = 2'-O-methoxyethyl guanosine
  modified_base 2: mod_base = OTHER; note = Locked nucleic acid with 5-methylcytidine base
  modified_base 3: mod_base = OTHER; note = 2'-O-methoxyethyl adenosine
  modified_base 4: mod_base = OTHER; note = Locked nucleic acid with guanine base
  modified_base 5: mod_base = OTHER; note = 2'-O-methoxyethyl adenosine
  modified_base 10: mod_base = OTHER; note = 2'-O-methoxyethyl adenosine
  modified_base 13: mod_base = OTHER; note = 2'-deoxy 5-methylcytidine
  modified_base 16: mod_base = OTHER; note = 2'-O-methoxyethyl adenosine
  modified_base 17: mod_base = OTHER; note = 2'-O-methoxyethyl guanosine
  modified_base 18: mod_base = OTHER; note = 2'-O-methoxyethyl uridine
  modified_base 19: mod_base = OTHER; note = 2'-O-methoxyethyl guanosine
  modified_base 20: mod_base = OTHER; note = 2'-O-methoxyethyl 5-methylcytidine
  misc_feature 1..5: note = RNA
  misc_feature 6..9: note = DNA
  misc_feature 10: note = RNA
  misc_feature 11..15: note = DNA
  misc_feature 16..20: note = RNA
gcagaggtgaagcgaagtgc

SEQ ID NO: 300 - DNA, 20 bp, synthetic construct
  source 1..20: mol_type = other DNA
  modified_base 1: mod_base = OTHER; note = Locked nucleic acid with guanine base
  modified_base 2: mod_base = OTHER; note = Locked nucleic acid with 5-methylcytidine base
  modified_base 3: mod_base = OTHER; note = 2'-O-methoxyethyl adenosine
  modified_base 4: mod_base = OTHER; note = Locked nucleic acid with guanine base
  modified_base 5: mod_base = OTHER; note = 2'-O-methoxyethyl adenosine
  modified_base 10: mod_base = OTHER; note = 2'-O-methoxyethyl adenosine
  modified_base 13: mod_base = OTHER; note = 2'-deoxy 5-methylcytidine
  modified_base 16: mod_base = OTHER; note = 2'-O-methoxyethyl adenosine
  modified_base 17: mod_base = OTHER; note = 2'-O-methoxyethyl guanosine
  modified_base 18: mod_base = OTHER; note = 2'-O-methoxyethyl uridine
  modified_base 19: mod_base = OTHER; note = 2'-O-methoxyethyl guanosine
  modified_base 20: mod_base = OTHER; note = 2'-O-methoxyethyl 5-methylcytidine
  misc_feature 1..5: note = RNA
  misc_feature 6..9: note = DNA
  misc_feature 10: note = RNA
  misc_feature 11..15: note = DNA
  misc_feature 16..20: note = RNA
gcagaggtgaagcgaagtgc

SEQ ID NO: 301 - DNA, 20 bp, synthetic construct
  source 1..20: mol_type = other DNA
  modified_base 1: mod_base = OTHER; note = Locked nucleic acid with guanine base
  modified_base 2: mod_base = OTHER; note = 2'-O-methoxyethyl 5-methylcytidine
  modified_base 3: mod_base = OTHER; note = Locked nucleic acid with adenine base
  modified_base 4: mod_base = OTHER; note = 2'-O-methoxyethyl guanosine
  modified_base 5: mod_base = OTHER; note = Locked nucleic acid with adenine base
  modified_base 10: mod_base = OTHER; note = 2'-O-methoxyethyl adenosine
  modified_base 13: mod_base = OTHER; note = 2'-deoxy 5-methylcytidine
  modified_base 16: mod_base = OTHER; note = 2'-O-methoxyethyl adenosine
  modified_base 17: mod_base = OTHER; note = 2'-O-methoxyethyl guanosine
  modified_base 18: mod_base = OTHER; note = 2'-O-methoxyethyl uridine
  modified_base 19: mod_base = OTHER; note = 2'-O-methoxyethyl guanosine
  modified_base 20: mod_base = OTHER; note = 2'-O-methoxyethyl 5-methylcytidine
  misc_feature 1..5: note = RNA
  misc_feature 6..9: note = DNA
  misc_feature 10: note = RNA
  misc_feature 11..15: note = DNA
  misc_feature 16..20: note = RNA
gcagaggtgaagcgaagtgc

SEQ ID NO: 302 - DNA, 20 bp, synthetic construct
  source 1..20: mol_type = other DNA
  modified_base 1: mod_base = OTHER; note = 2'-O-methoxyethyl guanosine
  modified_base 2: mod_base = OTHER; note = 2'-O-methoxyethyl 5-methylcytidine
  modified_base 3: mod_base = OTHER; note = 2'-O-methoxyethyl adenosine
  modified_base 4: mod_base = OTHER; note = 2'-O-methoxyethyl guanosine
  modified_base 5: mod_base = OTHER; note = 2'-O-methoxyethyl adenosine
  modified_base 13: mod_base = OTHER; note = 2'-deoxy 5-methylcytidine
  modified_base 16: mod_base = OTHER; note = Locked nucleic acid with adenine base
  modified_base 17: mod_base = OTHER; note = Locked nucleic acid with guanine base
  modified_base 18: mod_base = OTHER; note = Locked nucleic acid with thymine base
  modified_base 19: mod_base = OTHER; note = Locked nucleic acid with guanine base
  modified_base 20: mod_base = OTHER; note = Locked nucleic acid with cytosine base
  misc_feature 1..5: note = RNA
  misc_feature 6..15: note = DNA
  misc_feature 16..20: note = RNA
gcagaggtgaagcgaagtgc

SEQ ID NO: 303 - DNA, 20 bp, synthetic construct
  source 1..20: mol_type = other DNA
  modified_base 1: mod_base = OTHER; note = 2'-O-methoxyethyl guanosine
  modified_base 2: mod_base = OTHER; note = 2'-O-methoxyethyl 5-methylcytidine
  modified_base 3: mod_base = OTHER; note = 2'-O-methoxyethyl guanosine
  modified_base 4: mod_base = OTHER; note = 2'-O-methoxyethyl adenosine
  modified_base 5: mod_base = OTHER; note = 2'-O-methoxyethyl adenosine
  modified_base 9: mod_base = OTHER; note = 2'-deoxy 5-methylcytidine
  modified_base 11: mod_base = OTHER; note = 2'-deoxy 5-methylcytidine
  modified_base 13: mod_base = OTHER; note = 2'-deoxy 5-methylcytidine
  modified_base 16: mod_base = OTHER; note = 2'-fluoro 2'-deoxyuridine
  modified_base 17: mod_base = OTHER; note = 2'fluoro 2'-deoxy cytidine
  modified_base 18: mod_base = OTHER; note = 2'fluoro 2'-deoxy cytidine
  modified_base 19: mod_base = OTHER; note = 2'fluoro 2'-deoxy guanosine
  modified_base 20: mod_base = OTHER; note = 2'fluoro 2'-deoxy guanosine
  misc_feature 1..5: note = RNA
  misc_feature 6..15: note = DNA
  misc_feature 16..20: note = RNA
gcgaagtgcacacggtccgg

SEQ ID NO: 304 - DNA, 20 bp, synthetic construct
  source 1..20: mol_type = other DNA
  modified_base 1: mod_base = OTHER; note = 2'-O-methoxyethyl guanosine
  modified_base 2: mod_base = OTHER; note = 2'-O-methoxyethyl 5-methylcytidine
  modified_base 3: mod_base = OTHER; note = 2'-O-methoxyethyl adenosine
  modified_base 4: mod_base = OTHER; note = 2'-O-methoxyethyl guanosine
  modified_base 5: mod_base = OTHER; note = 2'-O-methoxyethyl adenosine
  modified_base 13: mod_base = OTHER; note = 2'-deoxy 5-methylcytidine
  modified_base 16: mod_base = OTHER; note = 2'-fluoro 2'-deoxyadenosine
  modified_base 17: mod_base = OTHER; note = 2'fluoro 2'-deoxy guanosine
  modified_base 18: mod_base = OTHER; note = 2'-fluoro 2'-deoxyuridine
  modified_base 19: mod_base = OTHER; note = 2'fluoro 2'-deoxy guanosine
  modified_base 20: mod_base = OTHER; note = 2'fluoro 2'-deoxy cytidine
  misc_feature 1..5: note = RNA
  misc_feature 6..15: note = DNA
  misc_feature 16..20: note = RNA
gcagaggtgaagcgaagtgc

SEQ ID NO: 305 - DNA, 20 bp, synthetic construct
  source 1..20: mol_type = other DNA
  modified_base 1: mod_base = OTHER; note = 2'-O-methoxyethyl guanosine
  modified_base 2: mod_base = OTHER; note = 2'-O-methoxyethyl 5-methylcytidine
  modified_base 3: mod_base = OTHER; note = 2'-O-methoxyethyl adenosine
  modified_base 4: mod_base = OTHER; note = 2'-O-methoxyethyl guanosine
  modified_base 5: mod_base = OTHER; note = 2'-O-methoxyethyl adenosine
  modified_base 13: mod_base = OTHER; note = 2'-deoxy 5-methylcytidine
  modified_base 16: mod_base = OTHER; note = Locked nucleic acid with adenine base
  modified_base 17: mod_base = OTHER; note = 2'-O-methoxyethyl guanosine
  modified_base 18: mod_base = OTHER; note = 2'-O-methoxyethyl uridine
  modified_base 19: mod_base = OTHER; note = 2'-O-methoxyethyl guanosine
  modified_base 20: mod_base = OTHER; note = 2'-O-methoxyethyl 5-methylcytidine
  misc_feature 1..5: note = RNA
  misc_feature 6..15: note = DNA
  misc_feature 16..20: note = RNA
gcagaggtgaagcgaagtgc

SEQ ID NO: 306 - DNA, 20 bp, synthetic construct
  source 1..20: mol_type = other DNA
  modified_base 1: mod_base = OTHER; note = 2'-O-methoxyethyl guanosine
  modified_base 2: mod_base = OTHER; note = 2'-O-methoxyethyl 5-methylcytidine
  modified_base 3: mod_base = OTHER; note = 2'-O-methoxyethyl adenosine
  modified_base 4: mod_base = OTHER; note = 2'-O-methoxyethyl guanosine
  modified_base 5: mod_base = OTHER; note = 2'-O-methoxyethyl adenosine
  modified_base 13: mod_base = OTHER; note = 2'-deoxy 5-methylcytidine
  modified_base 16: mod_base = OTHER; note = Locked nucleic acid with adenine base
  modified_base 17: mod_base = OTHER; note = Locked nucleic acid with guanine base
  modified_base 18: mod_base = OTHER; note = 2'-O-methoxyethyl uridine
  modified_base 19: mod_base = OTHER; note = 2'-O-methoxyethyl guanosine
  modified_base 20: mod_base = OTHER; note = 2'-O-methoxyethyl 5-methylcytidine
  misc_feature 1..5: note = RNA
  misc_feature 6..15: note = DNA
  misc_feature 16..20: note = RNA
gcagaggtgaagcgaagtgc

SEQ ID NO: 307 - DNA, 20 bp, synthetic construct
  source 1..20: mol_type = other DNA
  modified_base 1: mod_base = OTHER; note = 2'-O-methoxyethyl guanosine
  modified_base 2: mod_base = OTHER; note = 2'-O-methoxyethyl 5-methylcytidine
  modified_base 3: mod_base = OTHER; note = 2'-O-methoxyethyl adenosine
  modified_base 4: mod_base = OTHER; note = 2'-O-methoxyethyl guanosine
  modified_base 5: mod_base = OTHER; note = 2'-O-methoxyethyl adenosine
  modified_base 13: mod_base = OTHER; note = 2'-deoxy 5-methylcytidine
  modified_base 16: mod_base = OTHER; note = Locked nucleic acid with adenine base
  modified_base 17: mod_base = OTHER; note = Locked nucleic acid with guanine base
  modified_base 18: mod_base = OTHER; note = Locked nucleic acid with thymine base
  modified_base 19: mod_base = OTHER; note = 2'-O-methoxyethyl guanosine
  modified_base 20: mod_base = OTHER; note = 2'-O-methoxyethyl 5-methylcytidine
  misc_feature 1..5: note = RNA
  misc_feature 6..15: note = DNA
  misc_feature 16..20: note = RNA
gcagaggtgaagcgaagtgc

SEQ ID NO: 308 - DNA, 20 bp, synthetic construct
  source 1..20: mol_type = other DNA
  modified_base 1: mod_base = OTHER; note = 2'-O-methoxyethyl guanosine
  modified_base 2: mod_base = OTHER; note = 2'-O-methoxyethyl 5-methylcytidine
  modified_base 3: mod_base = OTHER; note = 2'-O-methoxyethyl adenosine
  modified_base 4: mod_base = OTHER; note = 2'-O-methoxyethyl guanosine
  modified_base 5: mod_base = OTHER; note = 2'-O-methoxyethyl adenosine
  modified_base 13: mod_base = OTHER; note = 2'-deoxy 5-methylcytidine
  modified_base 16: mod_base = OTHER; note = Locked nucleic acid with adenine base
  modified_base 17: mod_base = OTHER; note = Locked nucleic acid with guanine base
  modified_base 18: mod_base = OTHER; note = Locked nucleic acid with thymine base
  modified_base 19: mod_base = OTHER; note = Locked nucleic acid with guanine base
  modified_base 20: mod_base = OTHER; note = 2'-O-methoxyethyl 5-methylcytidine
  misc_feature 1..5: note = RNA
  misc_feature 6..15: note = DNA
  misc_feature 16..20: note = RNA
gcagaggtgaagcgaagtgc

SEQ ID NO: 309 - DNA, 20 bp, synthetic construct
  source 1..20: mol_type = other DNA
  modified_base 1: mod_base = OTHER; note = 2'-O-methoxyethyl guanosine
  modified_base 2: mod_base = OTHER; note = 2'-O-methoxyethyl 5-methylcytidine
  modified_base 3: mod_base = OTHER; note = 2'-O-methoxyethyl adenosine
  modified_base 4: mod_base = OTHER; note = 2'-O-methoxyethyl guanosine
  modified_base 5: mod_base = OTHER; note = 2'-O-methoxyethyl adenosine
  modified_base 6: mod_base = OTHER; note = 2'-O-methyl guanosine
  modified_base 11: mod_base = OTHER; note = 2'-O-methyl adenosine
  modified_base 13: mod_base = OTHER; note = 2'-deoxy 5-methylcytidine
  modified_base 16: mod_base = OTHER; note = Locked nucleic acid with adenine base
  modified_base 17: mod_base = OTHER; note = Locked nucleic acid with guanine base
  modified_base 18: mod_base = OTHER; note = Locked nucleic acid with thymine base
  modified_base 19: mod_base = OTHER; note = 2'-O-methoxyethyl guanosine
  modified_base 20: mod_base = OTHER; note = 2'-O-methoxyethyl 5-methylcytidine
  misc_feature 1..6: note = RNA
  misc_feature 7..10: note = DNA
  misc_feature 11: note = RNA
  misc_feature 12..15: note = DNA
  misc_feature 16..20: note = RNA
gcagaggtgaagcgaagtgc

SEQ ID NO: 310 - DNA, 20 bp, synthetic construct
  source 1..20: mol_type = other DNA
  modified_base 1: mod_base = OTHER; note = 2'-O-methoxyethyl guanosine
  modified_base 2: mod_base = OTHER; note = 2'-O-methoxyethyl 5-methylcytidine
  modified_base 3: mod_base = OTHER; note = 2'-O-methoxyethyl adenosine
  modified_base 4: mod_base = OTHER; note = 2'-O-methoxyethyl guanosine
  modified_base 5: mod_base = OTHER; note = 2'-O-methoxyethyl adenosine
  modified_base 6: mod_base = OTHER; note = 2'-O-methyl guanosine
  modified_base 11: mod_base = OTHER; note = 2'-O-methyl adenosine
  modified_base 13: mod_base = OTHER; note = 2'-deoxy 5-methylcytidine
  modified_base 16: mod_base = OTHER; note = Locked nucleic acid with adenine base
  modified_base 17: mod_base = OTHER; note = Locked nucleic acid with guanine base
  modified_base 18: mod_base = OTHER; note = 2'-O-methoxyethyl thymidine
  modified_base 19: mod_base = OTHER; note = Locked nucleic acid with guanine base
  modified_base 20: mod_base = OTHER; note = 2'-O-methoxyethyl 5-methylcytidine
  misc_feature 1..6: note = RNA
  misc_feature 7..10: note = DNA
  misc_feature 11: note = RNA
  misc_feature 12..15: note = DNA
  misc_feature 16..20: note = RNA
gcagaggtgaagcgaagtgc

SEQ ID NO: 311 - DNA, 20 bp, synthetic construct
  source 1..20: mol_type = other DNA
  modified_base 1: mod_base = OTHER; note = 2'-O-methoxyethyl guanosine
  modified_base 2: mod_base = OTHER; note = 2'-O-methoxyethyl 5-methylcytidine
  modified_base 3: mod_base = OTHER; note = 2'-O-methoxyethyl adenosine
  modified_base 4: mod_base = OTHER; note = 2'-O-methoxyethyl guanosine
  modified_base 5: mod_base = OTHER; note = 2'-O-methoxyethyl adenosine
  modified_base 6: mod_base = OTHER; note = 2'-O-methyl guanosine
  modified_base 11: mod_base = OTHER; note = 2'-O-methyl adenosine
  modified_base 13: mod_base = OTHER; note = 2'-deoxy 5-methylcytidine
  modified_base 16: mod_base = OTHER; note = Locked nucleic acid with adenine base
  modified_base 17: mod_base = OTHER; note = Locked nucleic acid with guanine base
  modified_base 18: mod_base = OTHER; note = 2'-O-methoxyethyl thymidine
  modified_base 19: mod_base = OTHER; note = 2'-O-methoxyethyl guanosine
  modified_base 20: mod_base = OTHER; note = Locked nucleic acid with cytosine base
  misc_feature 1..6: note = RNA
  misc_feature 7..10: note = DNA
  misc_feature 11: note = RNA
  misc_feature 12..15: note = DNA
  misc_feature 16..20: note = RNA
gcagaggtgaagcgaagtgc

SEQ ID NO: 312 - DNA, 20 bp, synthetic construct
  source 1..20: mol_type = other DNA
  modified_base 1: mod_base = OTHER; note = 2'-O-methoxyethyl guanosine
  modified_base 2: mod_base = OTHER; note = 2'-O-methoxyethyl 5-methylcytidine
  modified_base 3: mod_base = OTHER; note = 2'-O-methoxyethyl adenosine
  modified_base 4: mod_base = OTHER; note = 2'-O-methoxyethyl guanosine
  modified_base 5: mod_base = OTHER; note = 2'-O-methoxyethyl adenosine
  modified_base 6: mod_base = OTHER; note = 2'-O-methyl guanosine
  modified_base 11: mod_base = OTHER; note = 2'-O-methyl adenosine
  modified_base 13: mod_base = OTHER; note = 2'-deoxy 5-methylcytidine
  modified_base 16: mod_base = OTHER; note = Locked nucleic acid with adenine base
  modified_base 17: mod_base = OTHER; note = 2'-O-methoxyethyl guanosine
  modified_base 18: mod_base = OTHER; note = Locked nucleic acid with thymine base
  modified_base 19: mod_base = OTHER; note = Locked nucleic acid with guanine base
  modified_base 20: mod_base = OTHER; note = 2'-O-methoxyethyl 5-methylcytidine
  misc_feature 1..6: note = RNA
  misc_feature 7..10: note = DNA
  misc_feature 11: note = RNA
  misc_feature 12..15: note = DNA
  misc_feature 16..20: note = RNA
gcagaggtgaagcgaagtgc

SEQ ID NO: 313 - DNA, 20 bp, synthetic construct
  source 1..20: mol_type = other DNA
  modified_base 1: mod_base = OTHER; note = 2'-O-methoxyethyl guanosine
  modified_base 2: mod_base = OTHER; note = 2'-O-methoxyethyl 5-methylcytidine
  modified_base 3: mod_base = OTHER; note = 2'-O-methoxyethyl adenosine
  modified_base 4: mod_base = OTHER; note = 2'-O-methoxyethyl guanosine
  modified_base 5: mod_base = OTHER; note = 2'-O-methoxyethyl adenosine
  modified_base 6: mod_base = OTHER; note = 2'-O-methyl guanosine
  modified_base 11: mod_base = OTHER; note = 2'-O-methyl adenosine
  modified_base 13: mod_base = OTHER; note = 2'-deoxy 5-methylcytidine
  modified_base 16: mod_base = OTHER; note = Locked nucleic acid with adenine base
  modified_base 17: mod_base = OTHER; note = 2'-O-methoxyethyl guanosine
  modified_base 18: mod_base = OTHER; note = Locked nucleic acid with thymine base
  modified_base 19: mod_base = OTHER; note = 2'-O-methoxyethyl guanosine
  modified_base 20: mod_base = OTHER; note = Locked nucleic acid with cytosine base
  misc_feature 1..6: note = RNA
  misc_feature 7..10: note = DNA
  misc_feature 11: note = RNA
  misc_feature 12..15: note = DNA
  misc_feature 16..20: note = RNA
gcagaggtgaagcgaagtgc

SEQ ID NO: 314 - DNA, 20 bp, synthetic construct
  source 1..20: mol_type = other DNA
  modified_base 1: mod_base = OTHER; note = 2'-O-methoxyethyl guanosine
  modified_base 2: mod_base = OTHER; note = 2'-O-methoxyethyl 5-methylcytidine
  modified_base 3: mod_base = OTHER; note = 2'-O-methoxyethyl adenosine
  modified_base 4: mod_base = OTHER; note = 2'-O-methoxyethyl guanosine
  modified_base 5: mod_base = OTHER; note = 2'-O-methoxyethyl adenosine
  modified_base 6: mod_base = OTHER; note = 2'-O-methyl guanosine
  modified_base 11: mod_base = OTHER; note = 2'-O-methyl adenosine
  modified_base 13: mod_base = OTHER; note = 2'-deoxy 5-methylcytidine
  modified_base 16: mod_base = OTHER; note = Locked nucleic acid with adenine base
  modified_base 17: mod_base = OTHER; note = 2'-O-methoxyethyl guanosine
  modified_base 18: mod_base = OTHER; note = 2'-O-methoxyethyl thymidine
  modified_base 19: mod_base = OTHER; note = Locked nucleic acid with guanine base
  modified_base 20: mod_base = OTHER; note = Locked nucleic acid with cytosine base
  misc_feature 1..6: note = RNA
  misc_feature 7..10: note = DNA
  misc_feature 11: note = RNA
  misc_feature 12..15: note = DNA
  misc_feature 16..20: note = RNA
gcagaggtgaagcgaagtgc

SEQ ID NO: 315 - DNA, 20 bp, synthetic construct
  source 1..20: mol_type = other DNA
  modified_base 1: mod_base = OTHER; note = 2'-O-methoxyethyl guanosine
  modified_base 2: mod_base = OTHER; note = 2'-O-methoxyethyl 5-methylcytidine
  modified_base 3: mod_base = OTHER; note = 2'-O-methoxyethyl adenosine
  modified_base 4: mod_base = OTHER; note = 2'-O-methoxyethyl guanosine
  modified_base 5: mod_base = OTHER; note = 2'-O-methoxyethyl adenosine
  modified_base 6: mod_base = OTHER; note = 2'-O-methyl guanosine
  modified_base 11: mod_base = OTHER; note = 2'-O-methyl adenosine
  modified_base 13: mod_base = OTHER; note = 2'-deoxy 5-methylcytidine
  modified_base 16: mod_base = OTHER; note = 2'-O-methoxyethyl adenosine
  modified_base 17: mod_base = OTHER; note = Locked nucleic acid with guanine base
  modified_base 18: mod_base = OTHER; note = Locked nucleic acid with thymine base
  modified_base 19: mod_base = OTHER; note = Locked nucleic acid with guanine base
  modified_base 20: mod_base = OTHER; note = 2'-O-methoxyethyl 5-methylcytidine
  misc_feature 1..6: note = RNA
  misc_feature 7..10: note = DNA
  misc_feature 11: note = RNA
  misc_feature 12..15: note = DNA
  misc_feature 16..20: note = RNA
gcagaggtgaagcgaagtgc

SEQ ID NO: 316 - DNA, 20 bp, synthetic construct
  source 1..20: mol_type = other DNA
  modified_base 1: mod_base = OTHER; note = 2'-O-methoxyethyl guanosine
  modified_base 2: mod_base = OTHER; note = 2'-O-methoxyethyl 5-methylcytidine
  modified_base 3: mod_base = OTHER; note = 2'-O-methoxyethyl adenosine
  modified_base 4: mod_base = OTHER; note = 2'-O-methoxyethyl guanosine
  modified_base 5: mod_base = OTHER; note = 2'-O-methoxyethyl adenosine
  modified_base 6: mod_base = OTHER; note = 2'-O-methyl guanosine
  modified_base 11: mod_base = OTHER; note = 2'-O-methyl adenosine
  modified_base 13: mod_base = OTHER; note = 2'-deoxy 5-methylcytidine
  modified_base 16: mod_base = OTHER; note = 2'-O-methoxyethyl adenosine
  modified_base 17: mod_base = OTHER; note = Locked nucleic acid with guanine base
  modified_base 18: mod_base = OTHER; note = Locked nucleic acid with thymine base
  modified_base 19: mod_base = OTHER; note = 2'-O-methoxyethyl guanosine
  modified_base 20: mod_base = OTHER; note = Locked nucleic acid with cytosine base
  misc_feature 1..6: note = RNA
  misc_feature 7..10: note = DNA
  misc_feature 11: note = RNA
  misc_feature 12..15: note = DNA
  misc_feature 16..20: note = RNA
gcagaggtgaagcgaagtgc

SEQ ID NO: 317 - DNA, 20 bp, synthetic construct
  source 1..20: mol_type = other DNA
  modified_base 1: mod_base = OTHER; note = 2'-O-methoxyethyl guanosine
  modified_base 2: mod_base = OTHER; note = 2'-O-methoxyethyl 5-methylcytidine
  modified_base 3: mod_base = OTHER; note = 2'-O-methoxyethyl adenosine
  modified_base 4: mod_base = OTHER; note = 2'-O-methoxyethyl guanosine
  modified_base 5: mod_base = OTHER; note = 2'-O-methoxyethyl adenosine
  modified_base 6: mod_base = OTHER; note = 2'-O-methyl guanosine
  modified_base 11: mod_base = OTHER; note = 2'-O-methyl adenosine
  modified_base 13: mod_base = OTHER; note = 2'-deoxy 5-methylcytidine
  modified_base 16: mod_base = OTHER; note = 2'-O-methoxyethyl adenosine
  modified_base 17: mod_base = OTHER; note = Locked nucleic acid with guanine base
  modified_base 18: mod_base = OTHER; note = 2'-O-methoxyethyl thymidine
  modified_base 19: mod_base = OTHER; note = Locked nucleic acid with guanine base
  modified_base 20: mod_base = OTHER; note = Locked nucleic acid with cytosine base
  misc_feature 1..6: note = RNA
  misc_feature 7..10: note = DNA
  misc_feature 11: note = RNA
  misc_feature 12..15: note = DNA
  misc_feature 16..20: note = RNA
gcagaggtgaagcgaagtgc

SEQ ID NO: 318 - DNA, 20 bp, synthetic construct
  source 1..20: mol_type = other DNA
  modified_base 1: mod_base = OTHER; note = 2'-O-methoxyethyl guanosine
  modified_base 2: mod_base = OTHER; note = 2'-O-methoxyethyl 5-methylcytidine
  modified_base 3: mod_base = OTHER; note = 2'-O-methoxyethyl adenosine
  modified_base 4: mod_base = OTHER; note = 2'-O-methoxyethyl guanosine
  modified_base 5: mod_base = OTHER; note = 2'-O-methoxyethyl adenosine
  modified_base 6: mod_base = OTHER; note = 2'-O-methyl guanosine
  modified_base 11: mod_base = OTHER; note = 2'-O-methyl adenosine
  modified_base 13: mod_base = OTHER; note = 2'-deoxy 5-methylcytidine
  modified_base 16: mod_base = OTHER; note = 2'-O-methoxyethyl adenosine
  modified_base 17: mod_base = OTHER; note = 2'-O-methoxyethyl guanosine
  modified_base 18: mod_base = OTHER; note = Locked nucleic acid with thymine base
  modified_base 19: mod_base = OTHER; note = Locked nucleic acid with guanine base
  modified_base 20: mod_base = OTHER; note = Locked nucleic acid with cytosine base
  misc_feature 1..6: note = RNA
  misc_feature 7..10: note = DNA
  misc_feature 11: note = RNA
  misc_feature 12..15: note = DNA
  misc_feature 16..20: note = RNA
gcagaggtgaagcgaagtgc

SEQ ID NO: 319 - DNA, 20 bp, synthetic construct
  source 1..20: mol_type = other DNA
  modified_base 1: mod_base = OTHER; note = 2'-O-methoxyethyl guanosine
  modified_base 2: mod_base = OTHER; note = 2'-O-methoxyethyl 5-methylcytidine
  modified_base 3: mod_base = OTHER; note = 2'-O-methoxyethyl adenosine
  modified_base 4: mod_base = OTHER; note = 2'-O-methoxyethyl guanosine
  modified_base 5: mod_base = OTHER; note = 2'-O-methoxyethyl adenosine
  modified_base 10: mod_base = OTHER; note = 2'-O-methyl adenosine
  modified_base 13: mod_base = OTHER; note = 2'-deoxy 5-methylcytidine
  modified_base 15: mod_base = OTHER; note = 2'-O-methyl adenosine
  modified_base 16: mod_base = OTHER; note = Locked nucleic acid with adenine base
  modified_base 17: mod_base = OTHER; note = Locked nucleic acid with guanine base
  modified_base 18: mod_base = OTHER; note = Locked nucleic acid with thymine base
  modified_base 19: mod_base = OTHER; note = 2'-O-methoxyethyl guanosine
  modified_base 20: mod_base = OTHER; note = 2'-O-methoxyethyl 5-methylcytidine
  misc_feature 1..5: note = RNA
  misc_feature 6..9: note = DNA
  misc_feature 10: note = RNA
  misc_feature 11..14: note = DNA
  misc_feature 15..20: note = RNA
gcagaggtgaagcgaagtgc

SEQ ID NO: 320 - DNA, 20 bp, synthetic construct
  source 1..20: mol_type = other DNA
  modified_base 1: mod_base = OTHER; note = 2'-O-methoxyethyl guanosine
  modified_base 2: mod_base = OTHER; note = 2'-O-methoxyethyl 5-methylcytidine
  modified_base 3: mod_base = OTHER; note = 2'-O-methoxyethyl adenosine
  modified_base 4: mod_base = OTHER; note = 2'-O-methoxyethyl guanosine
  modified_base 5: mod_base = OTHER; note = 2'-O-methoxyethyl adenosine
  modified_base 10: mod_base = OTHER; note = 2'-O-methyl adenosine
  modified_base 13: mod_base = OTHER; note = 2'-deoxy 5-methylcytidine
  modified_base 15: mod_base = OTHER; note = 2'-O-methyl adenosine
  modified_base 16: mod_base = OTHER; note = Locked nucleic acid with adenine base
  modified_base 17: mod_base = OTHER; note = Locked nucleic acid with guanine base
  modified_base 18: mod_base = OTHER; note = 2'-O-methoxyethyl thymidine
  modified_base 19: mod_base = OTHER; note = Locked nucleic acid with guanine base
  modified_base 20: mod_base = OTHER; note = 2'-O-methoxyethyl 5-methylcytidine
  misc_feature 1..5: note = RNA
  misc_feature 6..9: note = DNA
  misc_feature 10: note = RNA
  misc_feature 11..14: note = DNA
  misc_feature 15..20: note = RNA
gcagaggtgaagcgaagtgc

SEQ ID NO: 321 - DNA, 20 bp, synthetic construct
  source 1..20: mol_type = other DNA
  modified_base 1: mod_base = OTHER; note = 2'-O-methoxyethyl guanosine
  modified_base 2: mod_base = OTHER; note = 2'-O-methoxyethyl 5-methylcytidine
  modified_base 3: mod_base = OTHER; note = 2'-O-methoxyethyl adenosine
  modified_base 4: mod_base = OTHER; note = 2'-O-methoxyethyl guanosine
  modified_base 5: mod_base = OTHER; note = 2'-O-methoxyethyl adenosine
  modified_base 10: mod_base = OTHER; note = 2'-O-methyl adenosine
  modified_base 13: mod_base = OTHER; note = 2'-deoxy 5-methylcytidine
  modified_base 15: mod_base = OTHER; note = 2'-O-methyl adenosine
  modified_base 16: mod_base = OTHER; note = Locked nucleic acid with adenine base
  modified_base 17: mod_base = OTHER; note = Locked nucleic acid with guanine base
  modified_base 18: mod_base = OTHER; note = 2'-O-methoxyethyl thymidine
  modified_base 19: mod_base = OTHER; note = 2'-O-methoxyethyl guanosine
  modified_base 20: mod_base = OTHER; note = Locked nucleic acid with cytosine base
  misc_feature 1..5: note = RNA
  misc_feature 6..9: note = DNA
  misc_feature 10: note = RNA
  misc_feature 11..14: note = DNA
  misc_feature 15..20: note = RNA
gcagaggtgaagcgaagtgc

SEQ ID NO: 322 - DNA, 20 bp, synthetic construct
  source 1..20: mol_type = other DNA
  modified_base 1: mod_base = OTHER; note = 2'-O-methoxyethyl guanosine
  modified_base 2: mod_base = OTHER; note = 2'-O-methoxyethyl 5-methylcytidine
  modified_base 3: mod_base = OTHER; note = 2'-O-methoxyethyl adenosine
  modified_base 4: mod_base = OTHER; note = 2'-O-methoxyethyl guanosine
  modified_base 5: mod_base = OTHER; note = 2'-O-methoxyethyl adenosine
  modified_base 10: mod_base = OTHER; note = 2'-O-methyl adenosine
  modified_base 13: mod_base = OTHER; note = 2'-deoxy 5-methylcytidine
  modified_base 15: mod_base = OTHER; note = 2'-O-methyl adenosine
  modified_base 16: mod_base = OTHER; note = Locked nucleic acid with adenine base
  modified_base 17: mod_base = OTHER; note = 2'-O-methoxyethyl guanosine
  modified_base 18: mod_base = OTHER; note = Locked nucleic acid with thymine base
  modified_base 19: mod_base = OTHER; note = Locked nucleic acid with guanine base
  modified_base 20: mod_base = OTHER; note = 2'-O-methoxyethyl 5-methylcytidine
  misc_feature 1..5: note = RNA
  misc_feature 6..9: note = DNA
  misc_feature 10: note = RNA
  misc_feature 11..14: note = DNA
  misc_feature 15..20: note = RNA
gcagaggtgaagcgaagtgc

SEQ ID NO: 323 - DNA, 20 bp, synthetic construct
  source 1..20: mol_type = other DNA
  modified_base 1: mod_base = OTHER; note = 2'-O-methoxyethyl guanosine
  modified_base 2: mod_base = OTHER; note = 2'-O-methoxyethyl 5-methylcytidine
  modified_base 3: mod_base = OTHER; note = 2'-O-methoxyethyl adenosine
  modified_base 4: mod_base = OTHER; note = 2'-O-methoxyethyl guanosine
  modified_base 5: mod_base = OTHER; note = 2'-O-methoxyethyl adenosine
  modified_base 10: mod_base = OTHER; note = 2'-O-methyl adenosine
  modified_base 13: mod_base = OTHER; note = 2'-deoxy 5-methylcytidine
  modified_base 15: mod_base = OTHER; note = 2'-O-methyl adenosine
  modified_base 16: mod_base = OTHER; note = Locked nucleic acid with adenine base
  modified_base 17: mod_base = OTHER; note = 2'-O-methoxyethyl guanosine
  modified_base 18: mod_base = OTHER; note = Locked nucleic acid with thymine base
  modified_base 19: mod_base = OTHER; note = 2'-O-methoxyethyl guanosine
  modified_base 20: mod_base = OTHER; note = Locked nucleic acid with cytosine base
  misc_feature 1..5: note = RNA
  misc_feature 6..9: note = DNA
  misc_feature 10: note = RNA
  misc_feature 11..14: note = DNA
  misc_feature 15..20: note = RNA
gcagaggtgaagcgaagtgc

SEQ ID NO: 324 - DNA, 20 bp, synthetic construct
  source 1..20: mol_type = other DNA
  modified_base 1: mod_base = OTHER; note = 2'-O-methoxyethyl guanosine
  modified_base 2: mod_base = OTHER; note = 2'-O-methoxyethyl 5-methylcytidine
  modified_base 3: mod_base = OTHER; note = 2'-O-methoxyethyl adenosine
  modified_base 4: mod_base = OTHER; note = 2'-O-methoxyethyl guanosine
  modified_base 5: mod_base = OTHER; note = 2'-O-methoxyethyl adenosine
  modified_base 10: mod_base = OTHER; note = 2'-O-methyl adenosine
  modified_base 13: mod_base = OTHER; note = 2'-deoxy 5-methylcytidine
  modified_base 15: mod_base = OTHER; note = 2'-O-methyl adenosine
  modified_base 16: mod_base = OTHER; note = Locked nucleic acid with adenine base
  modified_base 17: mod_base = OTHER; note = 2'-O-methoxyethyl guanosine
  modified_base 18: mod_base = OTHER; note = 2'-O-methoxyethyl thymidine
  modified_base 19: mod_base = OTHER; note = Locked nucleic acid with guanine base
  modified_base 20: mod_base = OTHER; note = Locked nucleic acid with cytosine base
  misc_feature 1..5: note = RNA
  misc_feature 6..9: note = DNA
  misc_feature 10: note = RNA
  misc_feature 11..14: note = DNA
  misc_feature 15..20: note = RNA
gcagaggtgaagcgaagtgc

SEQ ID NO: 325 - DNA, 20 bp, synthetic construct
  source 1..20: mol_type = other DNA
  modified_base 1: mod_base = OTHER; note = 2'-O-methoxyethyl guanosine
  modified_base 2: mod_base = OTHER; note = 2'-O-methoxyethyl 5-methylcytidine
  modified_base 3: mod_base = OTHER; note = 2'-O-methoxyethyl adenosine
  modified_base 4: mod_base = OTHER; note = 2'-O-methoxyethyl guanosine
  modified_base 5: mod_base = OTHER; note = 2'-O-methoxyethyl adenosine
  modified_base 10: mod_base = OTHER; note = 2'-O-methyl adenosine
  modified_base 13: mod_base = OTHER; note = 2'-deoxy 5-methylcytidine
  modified_base 15: mod_base = OTHER; note = 2'-O-methyl adenosine
  modified_base 16: mod_base = OTHER; note = 2'-O-methoxyethyl adenosine
  modified_base 17: mod_base = OTHER; note = Locked nucleic acid with guanine base
  modified_base 18: mod_base = OTHER; note = Locked nucleic acid with thymine base
  modified_base 19: mod_base = OTHER; note = Locked nucleic acid with guanine base
  modified_base 20: mod_base = OTHER; note = 2'-O-methoxyethyl 5-methylcytidine
  misc_feature 1..5: note = RNA
  misc_feature 6..9: note = DNA
  misc_feature 10: note = RNA
  misc_feature 11..14: note = DNA
  misc_feature 15..20: note = RNA
gcagaggtgaagcgaagtgc

SEQ ID NO: 326 - DNA, 20 bp, synthetic construct
  source 1..20: mol_type = other DNA
  modified_base 1: mod_base = OTHER; note = 2'-O-methoxyethyl guanosine
  modified_base 2: mod_base = OTHER; note = 2'-O-methoxyethyl 5-methylcytidine
  modified_base 3: mod_base = OTHER; note = 2'-O-methoxyethyl adenosine
  modified_base 4: mod_base = OTHER; note = 2'-O-methoxyethyl guanosine
  modified_base 5: mod_base = OTHER; note = 2'-O-methoxyethyl adenosine
  modified_base 10: mod_base = OTHER; note = 2'-O-methyl adenosine
  modified_base 13: mod_base = OTHER; note = 2'-deoxy 5-methylcytidine
  modified_base 15: mod_base = OTHER; note = 2'-O-methyl adenosine
  modified_base 16: mod_base = OTHER; note = 2'-O-methoxyethyl adenosine
  modified_base 17: mod_base = OTHER; note = Locked nucleic acid with guanine base
  modified_base 18: mod_base = OTHER; note = Locked nucleic acid with thymine base
  modified_base 19: mod_base = OTHER; note = 2'-O-methoxyethyl guanosine
  modified_base 20: mod_base = OTHER; note = Locked nucleic acid with cytosine base
  misc_feature 1..5: note = RNA
  misc_feature 6..9: note = DNA
  misc_feature 10: note = RNA
  misc_feature 11..14: note = DNA
  misc_feature 15..20: note = RNA
gcagaggtgaagcgaagtgc

SEQ ID NO: 327 - DNA, 20 bp, synthetic construct
  source 1..20: mol_type = other DNA
  modified_base 1: mod_base = OTHER; note = 2'-O-methoxyethyl guanosine
  modified_base 2: mod_base = OTHER; note = 2'-O-methoxyethyl 5-methylcytidine
  modified_base 3: mod_base = OTHER; note = 2'-O-methoxyethyl adenosine
  modified_base 4: mod_base = OTHER; note = 2'-O-methoxyethyl guanosine
  modified_base 5: mod_base = OTHER; note = 2'-O-methoxyethyl adenosine
  modified_base 10: mod_base = OTHER; note = 2'-O-methyl adenosine
  modified_base 13: mod_base = OTHER; note = 2'-deoxy 5-methylcytidine
  modified_base 15: mod_base = OTHER; note = 2'-O-methyl adenosine
  modified_base 16: mod_base = OTHER; note = 2'-O-methoxyethyl adenosine
  modified_base 17: mod_base = OTHER; note = Locked nucleic acid with guanine base
  modified_base 18: mod_base = OTHER; note = 2'-O-methoxyethyl thymidine
  modified_base 19: mod_base = OTHER; note = Locked nucleic acid with guanine base
  modified_base 20: mod_base = OTHER; note = Locked nucleic acid with cytosine base
  misc_feature 1..5: note = RNA
  misc_feature 6..9: note = DNA
  misc_feature 10: note = RNA
  misc_feature 11..14: note = DNA
  misc_feature 15..20: note = RNA
gcagaggtgaagcgaagtgc

SEQ ID NO: 328 - DNA, 20 bp, synthetic construct
  source 1..20: mol_type = other DNA
  modified_base 1: mod_base = OTHER; note = 2'-O-methoxyethyl guanosine
  modified_base 2: mod_base = OTHER; note = 2'-O-methoxyethyl 5-methylcytidine
  modified_base 3: mod_base = OTHER; note = 2'-O-methoxyethyl adenosine
  modified_base 4: mod_base = OTHER; note = 2'-O-methoxyethyl guanosine
  modified_base 5: mod_base = OTHER; note = 2'-O-methoxyethyl adenosine
  modified_base 10: mod_base = OTHER; note = 2'-O-methyl adenosine
  modified_base 13: mod_base = OTHER; note = 2'-deoxy 5-methylcytidine
  modified_base 15: mod_base = OTHER; note = 2'-O-methyl adenosine
  modified_base 16: mod_base = OTHER; note = 2'-O-methoxyethyl adenosine
  modified_base 17: mod_base = OTHER; note = 2'-O-methoxyethyl guanosine
  modified_base 18: mod_base = OTHER; note = Locked nucleic acid with thymine base
  modified_base 19: mod_base = OTHER; note = Locked nucleic acid with guanine base
  modified_base 20: mod_base = OTHER; note = Locked nucleic acid with cytosine base
  misc_feature 1..5: note = RNA
  misc_feature 6..9: note = DNA
  misc_feature 10: note = RNA
  misc_feature 11..14: note = DNA
  misc_feature 15..20: note = RNA
gcagaggtgaagcgaagtgc

SEQ ID NO: 329 - DNA, 20 bp, synthetic construct
  source 1..20: mol_type = other DNA
  modified_base 1: mod_base = OTHER; note = 2'-O-methoxyethyl guanosine
  modified_base 2: mod_base = OTHER; note = 2'-O-methoxyethyl 5-methylcytidine
  modified_base 3: mod_base = OTHER; note = 2'-O-methoxyethyl adenosine
  modified_base 4: mod_base = OTHER; note = 2'-O-methoxyethyl guanosine
  modified_base 5: mod_base = OTHER; note = 2'-O-methoxyethyl adenosine
  modified_base 10: mod_base = OTHER; note = 2'-O-methoxyethyl adenosine
  modified_base 13: mod_base = OTHER; note = 2'-deoxy 5-methylcytidine
  modified_base 16: mod_base = OTHER; note = Locked nucleic acid with adenine base
  modified_base 17: mod_base = OTHER; note = Locked nucleic acid with guanine base
  modified_base 18: mod_base = OTHER; note = 2'-O-methoxyethyl uridine
  modified_base 19: mod_base = OTHER; note = 2'-O-methoxyethyl guanosine
  modified_base 20: mod_base = OTHER; note = 2'-O-methoxyethyl 5-methylcytidine
  misc_feature 1..5: note = RNA
  misc_feature 6..9: note = DNA
  misc_feature 10: note = RNA
  misc_feature 11..15: note = DNA
  misc_feature 16..20: note = RNA
gcagaggtgaagcgaagtgc

SEQ ID NO: 330 - DNA, 20 bp, synthetic construct
  source 1..20: mol_type = other DNA
  modified_base 1: mod_base = OTHER; note = 2'-O-methoxyethyl guanosine
  modified_base 2: mod_base = OTHER; note = 2'-O-methoxyethyl 5-methylcytidine
  modified_base 3: mod_base = OTHER; note = 2'-O-methoxyethyl adenosine
  modified_base 4: mod_base = OTHER; note = 2'-O-methoxyethyl guanosine
  modified_base 5: mod_base = OTHER; note = 2'-O-methoxyethyl adenosine
  modified_base 10: mod_base = OTHER; note = 2'-O-methoxyethyl adenosine
  modified_base 13: mod_base = OTHER; note = 2'-deoxy 5-methylcytidine
  modified_base 16: mod_base = OTHER; note = 2'-O-methoxyethyl adenosine
  modified_base 17: mod_base = OTHER; note = Locked nucleic acid with guanine base
  modified_base 18: mod_base = OTHER; note = 2'-O-methoxyethyl uridine
  modified_base 19: mod_base = OTHER; note = Locked nucleic acid with guanine base
  modified_base 20: mod_base = OTHER; note = Locked nucleic acid with 5-methylcytidine base
  misc_feature 1..5: note = RNA
  misc_feature 6..9: note = DNA
  misc_feature 10: note = RNA
  misc_feature 11..15: note = DNA
  misc_feature 16..20: note = RNA
gcagaggtgaagcgaagtgc

SEQ ID NO: 331 - DNA, 20 bp, synthetic construct
  source 1..20: mol_type = other DNA
  modified_base 1: mod_base = OTHER; note = 2'-O-methoxyethyl guanosine
  modified_base 2: mod_base = OTHER; note = 2'-O-methoxyethyl 5-methylcytidine
  modified_base 3: mod_base = OTHER; note = 2'-O-methoxyethyl adenosine
  modified_base 4: mod_base = OTHER; note = 2'-O-methoxyethyl guanosine
  modified_base 5: mod_base = OTHER; note = 2'-O-methoxyethyl adenosine
  modified_base 10: mod_base = OTHER; note = 2'-O-methoxyethyl adenosine
  modified_base 13: mod_base = OTHER; note = 2'-deoxy 5-methylcytidine
  modified_base 16: mod_base = OTHER; note = 2'-O-methoxyethyl adenosine
  modified_base 17: mod_base = OTHER; note = Locked nucleic acid with guanine base
  modified_base 18: mod_base = OTHER; note = Locked nucleic acid with thymine base
  modified_base 19: mod_base = OTHER; note = Locked nucleic acid with guanine base
  modified_base 20: mod_base = OTHER; note = 2'-O-methoxyethyl 5-methylcytidine
  misc_feature 1..5: note = RNA
  misc_feature 6..9: note = DNA
  misc_feature 10: note = RNA
  misc_feature 11..15: note = DNA
  misc_feature 16..20: note = RNA
gcagaggtgaagcgaagtgc

SEQ ID NO: 332 - DNA, 20 bp, synthetic construct
  source 1..20: mol_type = other DNA
  modified_base 1: mod_base = OTHER; note = Locked nucleic acid with guanine base
  modified_base 2: mod_base = OTHER; note = Locked nucleic acid with cytosine base
  modified_base 3: mod_base = OTHER; note = Locked nucleic acid with adenine base
  modified_base 4: mod_base = OTHER; note = Locked nucleic acid with guanine base
  modified_base 5: mod_base = OTHER; note = Locked nucleic acid with adenine base
  modified_base 13: mod_base = OTHER; note = 2'-deoxy 5-methylcytidine
  modified_base 16: mod_base = OTHER; note = Locked nucleic acid with adenine base
  modified_base 17: mod_base = OTHER; note = Locked nucleic acid with guanine base
  modified_base 18: mod_base = OTHER; note = Locked nucleic acid with thymine base
  modified_base 19: mod_base = OTHER; note = Locked nucleic acid with guanine base
  modified_base 20: mod_base = OTHER; note = Locked nucleic acid with cytosine base
  misc_feature 1..5: note = RNA
  misc_feature 6..15: note = DNA
  misc_feature 16..20: note = RNA
gcagaggtgaagcgaagtgc

SEQ ID NO: 333 - DNA, 20 bp, synthetic construct
  source 1..20: mol_type = other DNA
  modified_base 1: mod_base = OTHER; note = Locked nucleic acid with guanine base
  modified_base 2: mod_base = OTHER; note = Locked nucleic acid with cytosine base
  modified_base 3: mod_base = OTHER; note = 2'-O-methoxyethyl adenosine
  modified_base 4: mod_base = OTHER; note = 2'-O-methoxyethyl guanosine
  modified_base 5: mod_base = OTHER; note = 2'-O-methoxyethyl adenosine
  modified_base 6: mod_base = OTHER; note = 2'-O-methoxyethyl guanosine
  modified_base 7: mod_base = OTHER; note = 2'-O-methoxyethyl guanosine
  modified_base 8: mod_base = OTHER; note = 2'-O-methoxyethyl thymidine
  modified_base 9: mod_base = OTHER; note = 2'-O-methoxyethyl guanosine
  modified_base 10: mod_base = OTHER; note = 2'-O-methoxyethyl adenosine
  modified_base 11: mod_base = OTHER; note = 2'-O-methoxyethyl adenosine
  modified_base 12: mod_base = OTHER; note = 2'-O-methoxyethyl guanosine
  modified_base 13: mod_base = OTHER; note = 2'-O-methoxyethyl 5-methylcytidine
  modified_base 14: mod_base = OTHER; note = 2'-O-methoxyethyl guanosine
  modified_base 15: mod_base = OTHER; note = 2'-O-methoxyethyl adenosine
  modified_base 16: mod_base = OTHER; note = 2'-O-methoxyethyl adenosine
  modified_base 17: mod_base = OTHER; note = 2'-O-methoxyethyl guanosine
  modified_base 18: mod_base = OTHER; note = 2'-O-methoxyethyl thymidine
  modified_base 19: mod_base = OTHER; note = Locked nucleic acid with guanine base
  modified_base 20: mod_base = OTHER; note = Locked nucleic acid with cytosine base
  misc_feature 1..20: note = RNA
gcagaggtgaagcgaagtgc

SEQ ID NO: 334 - DNA, 20 bp, synthetic construct
  source 1..20: mol_type = other DNA
  modified_base 1: mod_base = OTHER; note = Locked nucleic acid with guanine base
  modified_base 2: mod_base = OTHER; note = 2'-O-methoxyethyl 5-methylcytidine
  modified_base 3: mod_base = OTHER; note = Locked nucleic acid with adenine base
  modified_base 4: mod_base = OTHER; note = 2'-O-methoxyethyl guanosine
  modified_base 5: mod_base = OTHER; note = 2'-O-methoxyethyl adenosine
  modified_base 13: mod_base = OTHER; note = 2'-deoxy 5-methylcytidine
  modified_base 16: mod_base = OTHER; note = 2'-fluoro 2'-deoxyadenosine
  modified_base 17: mod_base = OTHER; note = 2'fluoro 2'-deoxy guanosine
  modified_base 18: mod_base = OTHER; note = 2'-fluoro 2'-deoxyuridine
  modified_base 19: mod_base = OTHER; note = 2'fluoro 2'-deoxy guanosine
  modified_base 20: mod_base = OTHER; note = 2'fluoro 2'-deoxy cytidine
  misc_feature 1..5: note = RNA
  misc_feature 6..15: note = DNA
  misc_feature 16..20: note = RNA
gcagaggtgaagcgaagtgc

SEQ ID NO: 335 - DNA, 20 bp, synthetic construct
  source 1..20: mol_type = other DNA
  modified_base 1: mod_base = OTHER; note = Locked nucleic acid with guanine base
  modified_base 2: mod_base = OTHER; note = 2'-O-methoxyethyl 5-methylcytidine
  modified_base 3: mod_base = OTHER; note = Locked nucleic acid with adenine base
  modified_base 4: mod_base = OTHER; note = Locked nucleic acid with guanine base
  modified_base 5: mod_base = OTHER; note = 2'-O-methoxyethyl adenosine
  modified_base 13: mod_base = OTHER; note = 2'-deoxy 5-methylcytidine
  modified_base 16: mod_base = OTHER; note = 2'-fluoro 2'-deoxyadenosine
  modified_base 17: mod_base = OTHER; note = 2'fluoro 2'-deoxy guanosine
  modified_base 18: mod_base = OTHER; note = 2'-fluoro 2'-deoxyuridine
  modified_base 19: mod_base = OTHER; note = 2'fluoro 2'-deoxy guanosine
  modified_base 20: mod_base = OTHER; note = 2'fluoro 2'-deoxy cytidine
  misc_feature 1..5: note = RNA
  misc_feature 6..15: note = DNA
  misc_feature 16..20: note = RNA
gcagaggtgaagcgaagtgc

SEQ ID NO: 336 - DNA, 20 bp, synthetic construct
  source 1..20: mol_type = other DNA
  modified_base 1: mod_base = OTHER; note = Locked nucleic acid with guanine base
  modified_base 2: mod_base = OTHER; note = 2'-deoxy 5-methylcytidine
  modified_base 3: mod_base = OTHER; note = Locked nucleic acid with adenine base
  modified_base 4: mod_base = OTHER; note = 2'-O-methoxyethyl guanosine
  modified_base 5: mod_base = OTHER; note = 2'-O-methoxyethyl adenosine
  modified_base 6: mod_base = OTHER; note = 2'-O-methyl guanosine
  modified_base 11: mod_base = OTHER; note = 2'-O-methyl adenosine
  modified_base 13: mod_base = OTHER; note = 2'-deoxy 5-methylcytidine
  modified_base 16: mod_base = OTHER; note = Locked nucleic acid with adenine base
  modified_base 17: mod_base = OTHER; note = Locked nucleic acid with guanine base
  modified_base 18: mod_base = OTHER; note = 2'-O-methoxyethyl uridine
  modified_base 19: mod_base = OTHER; note = 2'-O-methoxyethyl guanosine
  modified_base 20: mod_base = OTHER; note = 2'-O-methoxyethyl 5-methylcytidine
  misc_feature 1: note = RNA
  misc_feature 2: note = DNA
  misc_feature 3..6: note = RNA
  misc_feature 7..10: note = DNA
  misc_feature 11: note = RNA
  misc_feature 12..15: note = DNA
  misc_feature 16..20: note = RNA
gcagaggtgaagcgaagtgc

SEQ ID NO: 337 - DNA, 20 bp, synthetic construct
  source 1..20: mol_type = other DNA
  modified_base 1: mod_base = OTHER; note = Locked nucleic acid with guanine base
  modified_base 2: mod_base = OTHER; note = 2'-deoxy 5-methylcytidine
  modified_base 3: mod_base = OTHER; note = Locked nucleic acid with adenine base
  modified_base 5: mod_base = OTHER; note = 2'-O-methoxyethyl adenosine
  modified_base 6: mod_base = OTHER; note = 2'-O-methyl guanosine
  modified_base 11: mod_base = OTHER; note = 2'-O-methyl adenosine
  modified_base 13: mod_base = OTHER; note = 2'-deoxy 5-methylcytidine
  modified_base 16: mod_base = OTHER; note = Locked nucleic acid with adenine base
  modified_base 17: mod_base = OTHER; note = Locked nucleic acid with guanine base
  modified_base 18: mod_base = OTHER; note = 2'-O-methoxyethyl uridine
  modified_base 19: mod_base = OTHER; note = 2'-O-methoxyethyl guanosine
  modified_base 20: mod_base = OTHER; note = 2'-O-methoxyethyl 5-methylcytidine
  misc_feature 1: note = RNA
  misc_feature 2: note = DNA
  misc_feature 3: note = RNA
  misc_feature 4: note = DNA
  misc_feature 5..6: note = RNA
  misc_feature 7..10: note = DNA
  misc_feature 11: note = RNA
  misc_feature 12..15: note = DNA
  misc_feature 16..20: note = RNA
gcagaggtgaagcgaagtgc

SEQ ID NO: 338 - DNA, 20 bp, synthetic construct
  source 1..20: mol_type = other DNA
  modified_base 1: mod_base = OTHER; note = Locked nucleic acid with guanine base
  modified_base 2: mod_base = OTHER; note = 2'-deoxy 5-methylcytidine
  modified_base 3: mod_base = OTHER; note = Locked nucleic acid with adenine base
  modified_base 4: mod_base = OTHER; note = 2'-O-methoxyethyl guanosine
  modified_base 5: mod_base = OTHER; note = 2'-O-methoxyethyl adenosine
  modified_base 10: mod_base = OTHER; note = 2'-O-methyl adenosine
  modified_base 13: mod_base = OTHER; note = 2'-deoxy 5-methylcytidine
  modified_base 15: mod_base = OTHER; note = 2'-O-methyl adenosine
  modified_base 16: mod_base = OTHER; note = Locked nucleic acid with adenine base
  modified_base 17: mod_base = OTHER; note = Locked nucleic acid with guanine base
  modified_base 18: mod_base = OTHER; note = 2'-O-methoxyethyl uridine
  modified_base 19: mod_base = OTHER; note = 2'-O-methoxyethyl guanosine
  modified_base 20: mod_base = OTHER; note = 2'-O-methoxyethyl 5-methylcytidine
  misc_feature 1: note = RNA
  misc_feature 2: note = DNA
  misc_feature 3..5: note = RNA
  misc_feature 6..9: note = DNA
  misc_feature 10: note = RNA
  misc_feature 11..14: note = DNA
  misc_feature 15..20: note = RNA
gcagaggtgaagcgaagtgc

SEQ ID NO: 339 - DNA, 20 bp, synthetic construct
  source 1..20: mol_type = other DNA
  modified_base 1: mod_base = OTHER; note = Locked nucleic acid with guanine base
  modified_base 2: mod_base = OTHER; note = 2'-deoxy 5-methylcytidine
  modified_base 3: mod_base = OTHER; note = Locked nucleic acid with adenine base
  modified_base 5: mod_base = OTHER; note = 2'-O-methoxyethyl adenosine
  modified_base 10: mod_base = OTHER; note = 2'-O-methyl adenosine
  modified_base 13: mod_base = OTHER; note = 2'-deoxy 5-methylcytidine
  modified_base 15: mod_base = OTHER; note = 2'-O-methyl adenosine
  modified_base 16: mod_base = OTHER; note = Locked nucleic acid with adenine base
  modified_base 17: mod_base = OTHER; note = Locked nucleic acid with guanine base
  modified_base 18: mod_base = OTHER; note = 2'-O-methoxyethyl uridine
  modified_base 19: mod_base = OTHER; note = 2'-O-methoxyethyl guanosine
  modified_base 20: mod_base = OTHER; note = 2'-O-methoxyethyl 5-methylcytidine
  misc_feature 1: note = RNA
  misc_feature 2: note = DNA
  misc_feature 3: note = RNA
  misc_feature 4: note = DNA
  misc_feature 5: note = RNA
  misc_feature 6..9: note = DNA
  misc_feature 10: note = RNA
  misc_feature 11..14: note = DNA
  misc_feature 15..20: note = RNA
gcagaggtgaagcgaagtgc

SEQ ID NO: 340 - DNA, 20 bp, synthetic construct
  source 1..20: mol_type = other DNA
  modified_base 1: mod_base = OTHER; note = 2'-O-methoxyethyl guanosine
  modified_base 2: mod_base = OTHER; note = 2'-deoxy 5-methylcytidine
  modified_base 3: mod_base = OTHER; note = Locked nucleic acid with adenine base
  modified_base 4: mod_base = OTHER; note = 2'-O-methoxyethyl guanosine
  modified_base 5: mod_base = OTHER; note = 2'-O-methoxyethyl adenosine
  modified_base 6: mod_base = OTHER; note = 2'-O-methyl guanosine
  modified_base 11: mod_base = OTHER; note = 2'-O-methyl adenosine
  modified_base 13: mod_base = OTHER; note = 2'-deoxy 5-methylcytidine
  modified_base 16: mod_base = OTHER; note = Locked nucleic acid with adenine base
  modified_base 17: mod_base = OTHER; note = Locked nucleic acid with guanine base
  modified_base 18: mod_base = OTHER; note = Locked nucleic acid with thymine base
  modified_base 19: mod_base = OTHER; note = 2'-O-methoxyethyl guanosine
  modified_base 20: mod_base = OTHER; note = 2'-O-methoxyethyl 5-methylcytidine
  misc_feature 1: note = RNA
  misc_feature 2: note = DNA
  misc_feature 3..6: note = RNA
  misc_feature 7..10: note = DNA
  misc_feature 11: note = RNA
  misc_feature 12..15: note = DNA
  misc_feature 16..20: note = RNA
gcagaggtgaagcgaagtgc

SEQ ID NO: 341 - DNA, 20 bp, synthetic construct
  source 1..20: mol_type = other DNA
  modified_base 1: mod_base = OTHER; note = 2'-O-methoxyethyl guanosine
  modified_base 2: mod_base = OTHER; note = 2'-deoxy 5-methylcytidine
  modified_base 3: mod_base = OTHER; note = Locked nucleic acid with adenine base
  modified_base 4: mod_base = OTHER; note = 2'-O-methoxyethyl guanosine
  modified_base 5: mod_base = OTHER; note = 2'-O-methoxyethyl adenosine
  modified_base 6: mod_base = OTHER; note = 2'-O-methyl guanosine
  modified_base 11: mod_base = OTHER; note = 2'-O-methyl adenosine
  modified_base 13: mod_base = OTHER; note = 2'-deoxy 5-methylcytidine
  modified_base 16: mod_base = OTHER; note = Locked nucleic acid with adenine base
  modified_base 17: mod_base = OTHER; note = 2'-O-methoxyethyl guanosine
  modified_base 18: mod_base = OTHER; note = Locked nucleic acid with thymine base
  modified_base 19: mod_base = OTHER; note = 2'-O-methoxyethyl guanosine
  modified_base 20: mod_base = OTHER; note = Locked nucleic acid with 5-methylcytidine base
  misc_feature 1: note = RNA
  misc_feature 2: note = DNA
  misc_feature 3..6: note = RNA
  misc_feature 7..10: note = DNA
  misc_feature 11: note = RNA
  misc_feature 12..15: note = DNA
  misc_feature 16..20: note = RNA
gcagaggtgaagcgaagtgc

SEQ ID NO: 342 - DNA, 20 bp, synthetic construct
  source 1..20: mol_type = other DNA
  modified_base 1: mod_base = OTHER; note = 2'-O-methoxyethyl guanosine
  modified_base 2: mod_base = OTHER; note = 2'-O-methoxyethyl 5-methylcytidine
  modified_base 3: mod_base = OTHER; note = Locked nucleic acid with adenine base
  modified_base 4: mod_base = OTHER; note = 2'-O-methoxyethyl guanosine
  modified_base 5: mod_base = OTHER; note = 2'-O-methoxyethyl adenosine
  modified_base 6: mod_base = OTHER; note = 2'-O-methyl guanosine
  modified_base 11: mod_base = OTHER; note = 2'-O-methyl adenosine
  modified_base 13: mod_base = OTHER; note = 2'-deoxy 5-methylcytidine
  modified_base 16: mod_base = OTHER; note = Locked nucleic acid with adenine base
  modified_base 17: mod_base = OTHER; note = 2'-O-methoxyethyl guanosine
  modified_base 18: mod_base = OTHER; note = Locked nucleic acid with thymine base
  modified_base 19: mod_base = OTHER; note = 2'-O-methoxyethyl guanosine
  modified_base 20: mod_base = OTHER; note = Locked nucleic acid with 5-methylcytidine base
  misc_feature 1..6: note = RNA
  misc_feature 7..10: note = DNA
  misc_feature 11: note = RNA
  misc_feature 12..15: note = DNA
  misc_feature 16..20: note = RNA
gcagaggtgaagcgaagtgc

SEQ ID NO: 343 - DNA, 20 bp, synthetic construct
  source 1..20: mol_type = other DNA
  modified_base 1: mod_base = OTHER; note = 2'-O-methoxyethyl guanosine
  modified_base 2: mod_base = OTHER; note = 2'-deoxy 5-methylcytidine
  modified_base 3: mod_base = OTHER; note = Locked nucleic acid with adenine base
  modified_base 5: mod_base = OTHER; note = 2'-O-methoxyethyl adenosine
  modified_base 6: mod_base = OTHER; note = 2'-O-methyl guanosine
  modified_base 11: mod_base = OTHER; note = 2'-O-methyl adenosine
  modified_base 13: mod_base = OTHER; note = 2'-deoxy 5-methylcytidine
  modified_base 16: mod_base = OTHER; note = Locked nucleic acid with adenine base
  modified_base 17: mod_base = OTHER; note = 2'-O-methoxyethyl guanosine
  modified_base 18: mod_base = OTHER; note = Locked nucleic acid with thymine base
  modified_base 19: mod_base = OTHER; note = 2'-O-methoxyethyl guanosine
  modified_base 20: mod_base = OTHER; note = Locked nucleic acid with 5-methylcytidine base
  misc_feature 1: note = RNA
  misc_feature 2: note = DNA
  misc_feature 3: note = RNA
  misc_feature 4: note = DNA
  misc_feature 5..6: note = RNA
  misc_feature 7..10: note = DNA
  misc_feature 11: note = RNA
  misc_feature 12..15: note = DNA
  misc_feature 16..20: note = RNA
gcagaggtgaagcgaagtgc

SEQ ID NO: 344 - DNA, 20 bp, synthetic construct
  source 1..20: mol_type = other DNA
  modified_base 1: mod_base = OTHER; note = 2'-O-methoxyethyl guanosine
  modified_base 2: mod_base = OTHER; note = 2'-deoxy 5-methylcytidine
  modified_base 3: mod_base = OTHER; note = Locked nucleic acid with adenine base
  modified_base 4: mod_base = OTHER; note = 2'-O-methoxyethyl guanosine
  modified_base 5: mod_base = OTHER; note = 2'-O-methoxyethyl adenosine
  modified_base 10: mod_base = OTHER; note = 2'-O-methyl adenosine
  modified_base 13: mod_base = OTHER; note = 2'-deoxy 5-methylcytidine
  modified_base 15: mod_base = OTHER; note = 2'-O-methyl adenosine
  modified_base 16: mod_base = OTHER; note = Locked nucleic acid with adenine base
  modified_base 17: mod_base = OTHER; note = Locked nucleic acid with guanine base
  modified_base 18: mod_base = OTHER; note = Locked nucleic acid with thymine base
  modified_base 19: mod_base = OTHER; note = 2'-O-methoxyethyl guanosine
  modified_base 20: mod_base = OTHER; note = 2'-O-methoxyethyl 5-methylcytidine
  misc_feature 1: note = RNA
  misc_feature 2: note = DNA
  misc_feature 3..5: note = RNA
  misc_feature 6..9: note = DNA
  misc_feature 10: note = RNA
  misc_feature 11..14: note = DNA
  misc_feature 15..20: note = RNA
gcagaggtgaagcgaagtgc

SEQ ID NO: 345 - DNA, 20 bp, synthetic construct
  source 1..20: mol_type = other DNA
  modified_base 1: mod_base = OTHER; note = 2'-O-methoxyethyl guanosine
  modified_base 2: mod_base = OTHER; note = 2'-deoxy 5-methylcytidine
  modified_base 3: mod_base = OTHER; note = Locked nucleic acid with adenine base
  modified_base 4: mod_base = OTHER; note = 2'-O-methoxyethyl guanosine
  modified_base 5: mod_base = OTHER; note = 2'-O-methoxyethyl adenosine
  modified_base 10: mod_base = OTHER; note = 2'-O-methyl adenosine
  modified_base 13: mod_base = OTHER; note = 2'-deoxy 5-methylcytidine
  modified_base 15: mod_base = OTHER; note = 2'-O-methyl adenosine
  modified_base 16: mod_base = OTHER; note = Locked nucleic acid with adenine base
  modified_base 17: mod_base = OTHER; note = 2'-O-methoxyethyl guanosine
  modified_base 18: mod_base = OTHER; note = Locked nucleic acid with thymine base
  modified_base 19: mod_base = OTHER; note = 2'-O-methoxyethyl guanosine
  modified_base 20: mod_base = OTHER; note = Locked nucleic acid with 5-methylcytidine base
  misc_feature 1: note = RNA
  misc_feature 2: note = DNA
  misc_feature 3..5: note = RNA
  misc_feature 6..9: note = DNA
  misc_feature 10: note = RNA
  misc_feature 11..14: note = DNA
  misc_feature 15..20: note = RNA
gcagaggtgaagcgaagtgc

SEQ ID NO: 346 - DNA, 20 bp, synthetic construct
  source 1..20: mol_type = other DNA
  modified_base 1: mod_base = OTHER; note = Locked nucleic acid with guanine base
  modified_base 2: mod_base = OTHER; note = Locked nucleic acid with 5-methylcytidine base
  modified_base 3: mod_base = OTHER; note = 2'-O-methoxyethyl adenosine
  modified_base 4: mod_base = OTHER; note = Locked nucleic acid with guanine base
  modified_base 5: mod_base = OTHER; note = 2'-O-methoxyethyl adenosine
  modified_base 10: mod_base = OTHER; note = 2'-O-methoxyethyl adenosine
  modified_base 13: mod_base = OTHER; note = 2'-deoxy 5-methylcytidine
  modified_base 17: mod_base = OTHER; note = 2'-O-methoxyethyl guanosine
  modified_base 18: mod_base = OTHER; note = 2'-O-methoxyethyl thymidine
  modified_base 19: mod_base = OTHER; note = 2'-O-methoxyethyl guanosine
  modified_base 20: mod_base = OTHER; note = 2'-O-methoxyethyl 5-methylcytidine
  misc_feature 1..5: note = RNA
  misc_feature 6..9: note = DNA
  misc_feature 10: note = RNA
  misc_feature 11..16: note = DNA
  misc_feature 17..20: note = RNA
gcagaggtgaagcgaagtgc

SEQ ID NO: 347 - DNA, 20 bp, synthetic construct
  source 1..20: mol_type = other DNA
  modified_base 1: mod_base = OTHER; note = Locked nucleic acid with guanine base
  modified_base 2: mod_base = OTHER; note = Locked nucleic acid with 5-methylcytidine base
  modified_base 3: mod_base = OTHER; note = 2'-O-methoxyethyl adenosine
  modified_base 4: mod_base = OTHER; note = Locked nucleic acid with guanine base
  modified_base 10: mod_base = OTHER; note = 2'-O-methoxyethyl adenosine
  modified_base 13: mod_base = OTHER; note = 2'-deoxy 5-methylcytidine
  modified_base 16: mod_base = OTHER; note = 2'-O-methoxyethyl adenosine
  modified_base 17: mod_base = OTHER; note = 2'-O-methoxyethyl guanosine
  modified_base 18: mod_base = OTHER; note = 2'-O-methoxyethyl thymidine
  modified_base 19: mod_base = OTHER; note = 2'-O-methoxyethyl guanosine
  modified_base 20: mod_base = OTHER; note = 2'-O-methoxyethyl 5-methylcytidine
  misc_feature 1..4: note = RNA
  misc_feature 5..9: note = DNA
  misc_feature 10: note = RNA
  misc_feature 11..15: note = DNA
  misc_feature 16..20: note = RNA
gcagaggtgaagcgaagtgc

SEQ ID NO: 348 - DNA, 20 bp, synthetic construct
  source 1..20: mol_type = other DNA
  modified_base 1: mod_base = OTHER; note = Locked nucleic acid with guanine base
  modified_base 2: mod_base = OTHER; note = Locked nucleic acid with 5-methylcytidine base
  modified_base 3: mod_base = OTHER; note = 2'-O-methoxyethyl adenosine
  modified_base 4: mod_base = OTHER; note = Locked nucleic acid with guanine base
  modified_base 10: mod_base = OTHER; note = 2'-O-methoxyethyl adenosine
  modified_base 13: mod_base = OTHER; note = 2'-deoxy 5-methylcytidine
  modified_base 17: mod_base = OTHER; note = 2'-O-methoxyethyl guanosine
  modified_base 18: mod_base = OTHER; note = 2'-O-methoxyethyl thymidine
  modified_base 19: mod_base = OTHER; note = 2'-O-methoxyethyl guanosine
  modified_base 20: mod_base = OTHER; note = 2'-O-methoxyethyl 5-methylcytidine
  misc_feature 1..4: note = RNA
  misc_feature 5..9: note = DNA
  misc_feature 10: note = RNA
  misc_feature 11..16: note = DNA
  misc_feature 17..20: note = RNA
gcagaggtgaagcgaagtgc

SEQ ID NO: 349 - DNA, 20 bp, synthetic construct
  source 1..20: mol_type = other DNA
  modified_base 1: mod_base = OTHER; note = Locked nucleic acid with guanine base
  modified_base 2: mod_base = OTHER; note = 2'-O-methoxyethyl 5-methylcytidine
  modified_base 3: mod_base = OTHER; note = Locked nucleic acid with adenine base
  modified_base 4: mod_base = OTHER; note = Locked nucleic acid with guanine base
  modified_base 5: mod_base = OTHER; note = 2'-O-methoxyethyl adenosine
  modified_base 10: mod_base = OTHER; note = 2'-O-methoxyethyl adenosine
  modified_base 13: mod_base = OTHER; note = 2'-deoxy 5-methylcytidine
  modified_base 17: mod_base = OTHER; note = 2'-O-methoxyethyl guanosine
  modified_base 18: mod_base = OTHER; note = 2'-O-methoxyethyl thymidine
  modified_base 19: mod_base = OTHER; note = 2'-O-methoxyethyl guanosine
  modified_base 20: mod_base = OTHER; note = 2'-O-methoxyethyl 5-methylcytidine
  misc_feature 1..5: note = RNA
  misc_feature 6..9: note = DNA
  misc_feature 10: note = RNA
  misc_feature 11..16: note = DNA
  misc_feature 17..20: note = RNA
gcagaggtgaagcgaagtgc

SEQ ID NO: 350 - DNA, 20 bp, synthetic construct
  source 1..20: mol_type = other DNA
  modified_base 1: mod_base = OTHER; note = Locked nucleic acid with guanine base
  modified_base 2: mod_base = OTHER; note = 2'-O-methoxyethyl 5-methylcytidine
  modified_base 3: mod_base = OTHER; note = Locked nucleic acid with adenine base
  modified_base 4: mod_base = OTHER; note = 2'-O-methoxyethyl guanosine
  modified_base 5: mod_base = OTHER; note = 2'-O-methoxyethyl adenosine
  modified_base 10: mod_base = OTHER; note = 2'-O-methoxyethyl adenosine
  modified_base 13: mod_base = OTHER; note = 2'-deoxy 5-methylcytidine
  modified_base 16: mod_base = OTHER; note = 2'-O-methoxyethyl adenosine
  modified_base 17: mod_base = OTHER; note = 2'-O-methoxyethyl guanosine
  modified_base 18: mod_base = OTHER; note = 2'-O-methoxyethyl uridine
  modified_base 19: mod_base = OTHER; note = 2'-O-methoxyethyl guanosine
  modified_base 20: mod_base = OTHER; note = 2'-O-methoxyethyl 5-methylcytidine
  misc_feature 1..5: note = RNA
  misc_feature 6..9: note = DNA
  misc_feature 10: note = RNA
  misc_feature 11..15: note = DNA
  misc_feature 16..20: note = RNA
gcagaggtgaagcgaagtgc

SEQ ID NO: 351 - DNA, 20 bp, synthetic construct
  source 1..20: mol_type = other DNA
  modified_base 1: mod_base = OTHER; note = Locked nucleic acid with guanine base
  modified_base 2: mod_base = OTHER; note = 2'-O-methoxyethyl 5-methylcytidine
  modified_base 3: mod_base = OTHER; note = Locked nucleic acid with adenine base
  modified_base 4: mod_base = OTHER; note = 2'-O-methoxyethyl guanosine
  modified_base 5: mod_base = OTHER; note = 2'-O-methoxyethyl adenosine
  modified_base 10: mod_base = OTHER; note = 2'-O-methyl adenosine
  modified_base 13: mod_base = OTHER; note = 2'-deoxy 5-methylcytidine
  modified_base 17: mod_base = OTHER; note = 2'-O-methoxyethyl guanosine
  modified_base 18: mod_base = OTHER; note = 2'-O-methoxyethyl uridine
  modified_base 19: mod_base = OTHER; note = 2'-O-methoxyethyl guanosine
  modified_base 20: mod_base = OTHER; note = 2'-O-methoxyethyl 5-methylcytidine
  misc_feature 1..5: note = RNA
  misc_feature 6..9: note = DNA
  misc_feature 10: note = RNA
  misc_feature 11..16: note = DNA
  misc_feature 17..20: note = RNA
gcagaggtgaagcgaagtgc

SEQ ID NO: 352 - DNA, 20 bp, synthetic construct
  source 1..20: mol_type = other DNA
  modified_base 1: mod_base = OTHER; note = Locked nucleic acid with guanine base
  modified_base 2: mod_base = OTHER; note = 2'-O-methoxyethyl 5-methylcytidine
  modified_base 3: mod_base = OTHER; note = Locked nucleic acid with adenine base
  modified_base 4: mod_base = OTHER; note = 2'-O-methoxyethyl guanosine
  modified_base 5: mod_base = OTHER; note = 2'-O-methoxyethyl adenosine
  modified_base 10: mod_base = OTHER; note = 2'-O-methyl adenosine
  modified_base 13: mod_base = OTHER; note = 2'-deoxy 5-methylcytidine
  modified_base 18: mod_base = OTHER; note = 2'-O-methoxyethyl uridine
  modified_base 19: mod_base = OTHER; note = Locked nucleic acid with guanine base
  modified_base 20: mod_base = OTHER; note = Locked nucleic acid with 5-methylcytidine base
  misc_feature 1..5: note = RNA
  misc_feature 6..9: note = DNA
  misc_feature 10: note = RNA
  misc_feature 11..17: note = DNA
  misc_feature 18..20: note = RNA
gcagaggtgaagcgaagtgc

SEQ ID NO: 353 - DNA, 20 bp, synthetic construct
  source 1..20: mol_type = other DNA
  modified_base 1: mod_base = OTHER; note = Locked nucleic acid with guanine base
  modified_base 2: mod_base = OTHER; note = 2'-O-methoxyethyl 5-methylcytidine
  modified_base 3: mod_base = OTHER; note = Locked nucleic acid with adenine base
  modified_base 4: mod_base = OTHER; note = 2'-O-methoxyethyl guanosine
  modified_base 5: mod_base = OTHER; note = 2'-O-methoxyethyl adenosine
  modified_base 10: mod_base = OTHER; note = 2'-O-methoxyethyl adenosine
  modified_base 13: mod_base = OTHER; note = 2'-deoxy 5-methylcytidine
  modified_base 17: mod_base = OTHER; note = 2'-O-methoxyethyl guanosine
  modified_base 18: mod_base = OTHER; note = 2'-O-methoxyethyl uridine
  modified_base 19: mod_base = OTHER; note = 2'-O-methoxyethyl guanosine
  modified_base 20: mod_base = OTHER; note = 2'-O-methoxyethyl 5-methylcytidine
  misc_feature 1..5: note = RNA
  misc_feature 6..9: note = DNA
  misc_feature 10: note = RNA
  misc_feature 11..16: note = DNA
  misc_feature 17..20: note = RNA
gcagaggtgaagcgaagtgc

SEQ ID NO: 354 - DNA, 20 bp, synthetic construct
  source 1..20: mol_type = other DNA
  modified_base 1: mod_base = OTHER; note = Locked nucleic acid with guanine base
  modified_base 2: mod_base = OTHER; note = 2'-O-methoxyethyl 5-methylcytidine
  modified_base 3: mod_base = OTHER; note = Locked nucleic acid with adenine base
  modified_base 4: mod_base = OTHER; note = 2'-O-methoxyethyl guanosine
  modified_base 5: mod_base = OTHER; note = 2'-O-methoxyethyl adenosine
  modified_base 10: mod_base = OTHER; note = 2'-O-methoxyethyl adenosine
  modified_base 13: mod_base = OTHER; note = 2'-deoxy 5-methylcytidine
  modified_base 18: mod_base = OTHER; note = 2'-O-methoxyethyl uridine
  modified_base 19: mod_base = OTHER; note = 2'-O-methoxyethyl guanosine
  modified_base 20: mod_base = OTHER; note = 2'-O-methoxyethyl 5-methylcytidine
  misc_feature 1..5: note = RNA
  misc_feature 6..9: note = DNA
  misc_feature 10: note = RNA
  misc_feature 11..17: note = DNA
  misc_feature 18..20: note = RNA
gcagaggtgaagcgaagtgc

SEQ ID NO: 355 - DNA, 20 bp, synthetic construct
  source 1..20: mol_type = other DNA
  modified_base 1: mod_base = OTHER; note = Locked nucleic acid with guanine base
  modified_base 2: mod_base = OTHER; note = 2'-O-methoxyethyl 5-methylcytidine
  modified_base 3: mod_base = OTHER; note = Locked nucleic acid with adenine base
  modified_base 4: mod_base = OTHER; note = 2'-O-methoxyethyl guanosine
  modified_base 5: mod_base = OTHER; note = 2'-O-methoxyethyl adenosine
  modified_base 10: mod_base = OTHER; note = 2'-O-methoxyethyl adenosine
  modified_base 13: mod_base = OTHER; note = 2'-deoxy 5-methylcytidine
  modified_base 18: mod_base = OTHER; note = 2'-O-methoxyethyl uridine
  modified_base 19: mod_base = OTHER; note = 2'-O-methoxyethyl guanosine
  modified_base 20: mod_base = OTHER; note = Locked nucleic acid with 5-methylcytidine base
  misc_feature 1..5: note = RNA
  misc_feature 6..9: note = DNA
  misc_feature 10: note = RNA
  misc_feature 11..17: note = DNA
  misc_feature 18..20: note = RNA
gcagaggtgaagcgaagtgc

SEQ ID NO: 356 - DNA, 20 bp, synthetic construct
  source 1..20: mol_type = other DNA
  modified_base 1: mod_base = OTHER; note = Locked nucleic acid with guanine base
  modified_base 2: mod_base = OTHER; note = 2'-O-methoxyethyl 5-methylcytidine
  modified_base 3: mod_base = OTHER; note = Locked nucleic acid with adenine base
  modified_base 4: mod_base = OTHER; note = 2'-O-methoxyethyl guanosine
  modified_base 5: mod_base = OTHER; note = 2'-O-methoxyethyl adenosine
  modified_base 10: mod_base = OTHER; note = 2'-O-methoxyethyl adenosine
  modified_base 13: mod_base = OTHER; note = 2'-deoxy 5-methylcytidine
  modified_base 18: mod_base = OTHER; note = 2'-O-methoxyethyl uridine
  modified_base 19: mod_base = OTHER; note = Locked nucleic acid with guanine base
  modified_base 20: mod_base = OTHER; note = Locked nucleic acid with 5-methylcytidine base
  misc_feature 1..5: note = RNA
  misc_feature 6..9: note = DNA
  misc_feature 10: note = RNA
  misc_feature 11..17: note = DNA
  misc_feature 18..20: note = RNA
gcagaggtgaagcgaagtgc

SEQ ID NO: 357 - DNA, 20 bp, synthetic construct
  source 1..20: mol_type = other DNA
  modified_base 1: mod_base = OTHER; note = Locked nucleic acid with guanine base
  modified_base 2: mod_base = OTHER; note = 2'-O-methoxyethyl 5-methylcytidine
  modified_base 3: mod_base = OTHER; note = Locked nucleic acid with adenine base
  modified_base 4: mod_base = OTHER; note = 2'-O-methoxyethyl guanosine
  modified_base 5: mod_base = OTHER; note = 2'-O-methoxyethyl adenosine
  modified_base 10: mod_base = OTHER; note = 2'-O-methoxyethyl adenosine
  modified_base 13: mod_base = OTHER; note = 2'-deoxy 5-methylcytidine
  modified_base 19: mod_base = OTHER; note = 2'-O-methoxyethyl guanosine
  modified_base 20: mod_base = OTHER; note = 2'-O-methoxyethyl 5-methylcytidine
  misc_feature 1..5: note = RNA
  misc_feature 6..9: note = DNA
  misc_feature 10: note = RNA
  misc_feature 11..18: note = DNA
  misc_feature 19..20: note = RNA
gcagaggtgaagcgaagtgc

SEQ ID NO: 358 - DNA, 20 bp, synthetic construct
  source 1..20: mol_type = other DNA
  modified_base 1: mod_base = OTHER; note = Locked nucleic acid with guanine base
  modified_base 2: mod_base = OTHER; note = 2'-O-methoxyethyl 5-methylcytidine
  modified_base 3: mod_base = OTHER; note = Locked nucleic acid with adenine base
  modified_base 4: mod_base = OTHER; note = 2'-O-methoxyethyl guanosine
  modified_base 5: mod_base = OTHER; note = 2'-O-methoxyethyl adenosine
  modified_base 10: mod_base = OTHER; note = 2'-O-methoxyethyl adenosine
  modified_base 13: mod_base = OTHER; note = 2'-deoxy 5-methylcytidine
  modified_base 19: mod_base = OTHER; note = Locked nucleic acid with guanine base
  modified_base 20: mod_base = OTHER; note = Locked nucleic acid with 5-methylcytidine base
  misc_feature 1..5: note = RNA
  misc_feature 6..9: note = DNA
  misc_feature 10: note = RNA
  misc_feature 11..18: note = DNA
  misc_feature 19..20: note = RNA
gcagaggtgaagcgaagtgc

SEQ ID NO: 359 - DNA, 20 bp, synthetic construct
  source 1..20: mol_type = other DNA
  modified_base 1: mod_base = OTHER; note = Locked nucleic acid with guanine base
  modified_base 2: mod_base = OTHER; note = Locked nucleic acid with 5-methylcytidine base
  modified_base 3: mod_base = OTHER; note = 2'-O-methoxyethyl adenosine
  modified_base 4: mod_base = OTHER; note = 2'-O-methoxyethyl guanosine
  modified_base 5: mod_base = OTHER; note = 2'-O-methoxyethyl adenosine
  modified_base 10: mod_base = OTHER; note = 2'-O-methoxyethyl adenosine
  modified_base 13: mod_base = OTHER; note = 2'-deoxy 5-methylcytidine
  modified_base 17: mod_base = OTHER; note = 2'-O-methoxyethyl guanosine
  modified_base 18: mod_base = OTHER; note = 2'-O-methoxyethyl uridine
  modified_base 19: mod_base = OTHER; note = 2'-O-methoxyethyl guanosine
  modified_base 20: mod_base = OTHER; note = 2'-O-methoxyethyl 5-methylcytidine
  misc_feature 1..5: note = RNA
  misc_feature 6..9: note = DNA
  misc_feature 10: note = RNA
  misc_feature 11..16: note = DNA
  misc_feature 17..20: note = RNA
gcagaggtgaagcgaagtgc

SEQ ID NO: 360 - DNA, 20 bp, synthetic construct
  source 1..20: mol_type = other DNA
  modified_base 1: mod_base = OTHER; note = Locked nucleic acid with guanine base
  modified_base 2: mod_base = OTHER; note = Locked nucleic acid with 5-methylcytidine base
  modified_base 3: mod_base = OTHER; note = 2'-O-methoxyethyl adenosine
  modified_base 4: mod_base = OTHER; note = 2'-O-methoxyethyl guanosine
  modified_base 5: mod_base = OTHER; note = 2'-O-methoxyethyl adenosine
  modified_base 10: mod_base = OTHER; note = 2'-O-methoxyethyl adenosine
  modified_base 13: mod_base = OTHER; note = 2'-deoxy 5-methylcytidine
  modified_base 18: mod_base = OTHER; note = 2'-O-methoxyethyl uridine
  modified_base 19: mod_base = OTHER; note = 2'-O-methoxyethyl guanosine
  modified_base 20: mod_base = OTHER; note = 2'-O-methoxyethyl 5-methylcytidine
  misc_feature 1..5: note = RNA
  misc_feature 6..9: note = DNA
  misc_feature 10: note = RNA
  misc_feature 11..17: note = DNA
  misc_feature 18..20: note = RNA
gcagaggtgaagcgaagtgc

SEQ ID NO: 361 - DNA, 20 bp, synthetic construct
  source 1..20: mol_type = other DNA
  modified_base 1: mod_base = OTHER; note = Locked nucleic acid with guanine base
  modified_base 2: mod_base = OTHER; note = Locked nucleic acid with 5-methylcytidine base
  modified_base 3: mod_base = OTHER; note = 2'-O-methoxyethyl adenosine
  modified_base 4: mod_base = OTHER; note = 2'-O-methoxyethyl guanosine
  modified_base 5: mod_base = OTHER; note = 2'-O-methoxyethyl adenosine
  modified_base 10: mod_base = OTHER; note = 2'-O-methoxyethyl adenosine
  modified_base 13: mod_base = OTHER; note = 2'-deoxy 5-methylcytidine
  modified_base 18: mod_base = OTHER; note = 2'-O-methoxyethyl uridine
  modified_base 19: mod_base = OTHER; note = 2'-O-methoxyethyl guanosine
  modified_base 20: mod_base = OTHER; note = Locked nucleic acid with 5-methylcytidine base
  misc_feature 1..5: note = RNA
  misc_feature 6..9: note = DNA
  misc_feature 10: note = RNA
  misc_feature 11..17: note = DNA
  misc_feature 18..20: note = RNA
gcagaggtgaagcgaagtgc

SEQ ID NO: 362 - DNA, 20 bp, synthetic construct
  source 1..20: mol_type = other DNA
  modified_base 1: mod_base = OTHER; note = Locked nucleic acid with guanine base
  modified_base 2: mod_base = OTHER; note = Locked nucleic acid with 5-methylcytidine base
  modified_base 3: mod_base = OTHER; note = 2'-O-methoxyethyl adenosine
  modified_base 4: mod_base = OTHER; note = 2'-O-methoxyethyl guanosine
  modified_base 5: mod_base = OTHER; note = 2'-O-methoxyethyl adenosine
  modified_base 10: mod_base = OTHER; note = 2'-O-methoxyethyl adenosine
  modified_base 13: mod_base = OTHER; note = 2'-deoxy 5-methylcytidine
  modified_base 18: mod_base = OTHER; note = 2'-O-methoxyethyl uridine
  modified_base 19: mod_base = OTHER; note = Locked nucleic acid with guanine base
  modified_base 20: mod_base = OTHER; note = Locked nucleic acid with 5-methylcytidine base
  misc_feature 1..5: note = RNA
  misc_feature 6..9: note = DNA
  misc_feature 10: note = RNA
  misc_feature 11..17: note = DNA
  misc_feature 18..20: note = RNA
gcagaggtgaagcgaagtgc

SEQ ID NO: 363 - DNA, 20 bp, synthetic construct
  source 1..20: mol_type = other DNA
  modified_base 1: mod_base = OTHER; note = Locked nucleic acid with guanine base
  modified_base 2: mod_base = OTHER; note = Locked nucleic acid with 5-methylcytidine base
  modified_base 3: mod_base = OTHER; note = 2'-O-methoxyethyl adenosine
  modified_base 4: mod_base = OTHER; note = 2'-O-methoxyethyl guanosine
  modified_base 5: mod_base = OTHER; note = 2'-O-methoxyethyl adenosine
  modified_base 10: mod_base = OTHER; note = 2'-O-methoxyethyl adenosine
  modified_base 13: mod_base = OTHER; note = 2'-deoxy 5-methylcytidine
  modified_base 19: mod_base = OTHER; note = Locked nucleic acid with guanine base
  modified_base 20: mod_base = OTHER; note = Locked nucleic acid with 5-methylcytidine base
  misc_feature 1..5: note = RNA
  misc_feature 6..9: note = DNA
  misc_feature 10: note = RNA
  misc_feature 11..18: note = DNA
  misc_feature 19..20: note = RNA
gcagaggtgaagcgaagtgc

SEQ ID NO: 364 - DNA, 20 bp, synthetic construct
  source 1..20: mol_type = other DNA
  modified_base 1: mod_base = OTHER; note = 2'-O-methoxyethyl guanosine
  modified_base 2: mod_base = OTHER; note = 2'-O-methoxyethyl 5-methylcytidine
  modified_base 3: mod_base = OTHER; note = 2'-O-methoxyethyl adenosine
  modified_base 4: mod_base = OTHER; note = 2'-O-methoxyethyl guanosine
  modified_base 5: mod_base = OTHER; note = 2'-O-methoxyethyl adenosine
  modified_base 10: mod_base = OTHER; note = 2'-O-methoxyethyl adenosine
  modified_base 13: mod_base = OTHER; note = 2'-deoxy 5-methylcytidine
  modified_base 18: mod_base = OTHER; note = 2'-O-methoxyethyl uridine
  modified_base 19: mod_base = OTHER; note = Locked nucleic acid with guanine base
  modified_base 20: mod_base = OTHER; note = Locked nucleic acid with 5-methylcytidine base
  misc_feature 1..5: note = RNA
  misc_feature 6..9: note = DNA
  misc_feature 10: note = RNA
  misc_feature 11..17: note = DNA
  misc_feature 18..20: note = RNA
gcagaggtgaagcgaagtgc

SEQ ID NO: 365 - DNA, 20 bp, synthetic construct
  source 1..20: mol_type = other DNA
  modified_base 1: mod_base = OTHER; note = 2'-O-methoxyethyl guanosine
  modified_base 2: mod_base = OTHER; note = 2'-deoxy 5-methylcytidine
  modified_base 3: mod_base = OTHER; note = Locked nucleic acid with adenine base
  modified_base 4: mod_base = OTHER; note = 2'-O-methoxyethyl guanosine
  modified_base 5: mod_base = OTHER; note = 2'-O-methoxyethyl adenosine
  modified_base 10: mod_base = OTHER; note = 2'-O-methoxyethyl adenosine
  modified_base 13: mod_base = OTHER; note = 2'-deoxy 5-methylcytidine
  modified_base 18: mod_base = OTHER; note = 2'-O-methoxyethyl uridine
  modified_base 19: mod_base = OTHER; note = Locked nucleic acid with guanine base
  modified_base 20: mod_base = OTHER; note = Locked nucleic acid with 5-methylcytidine base
  misc_feature 1: note = RNA
  misc_feature 2: note = DNA
  misc_feature 3..5: note = RNA
  misc_feature 6..9: note = DNA
  misc_feature 10: note = RNA
  misc_feature 11..17: note = DNA
  misc_feature 18..20: note = RNA
gcagaggtgaagcgaagtgc

SEQ ID NO: 366 - DNA, 20 bp, synthetic construct
  source 1..20: mol_type = other DNA
  modified_base 1: mod_base = OTHER; note = Locked nucleic acid with guanine base
  modified_base 2: mod_base = OTHER; note = 2'-deoxy 5-methylcytidine
  modified_base 3: mod_base = OTHER; note = Locked nucleic acid with adenine base
  modified_base 4: mod_base = OTHER; note = 2'-O-methoxyethyl guanosine
  modified_base 5: mod_base = OTHER; note = 2'-O-methoxyethyl adenosine
  modified_base 10: mod_base = OTHER; note = 2'-O-methoxyethyl adenosine
  modified_base 13: mod_base = OTHER; note = 2'-deoxy 5-methylcytidine
  modified_base 17: mod_base = OTHER; note = 2'-O-methoxyethyl guanosine
  modified_base 18: mod_base = OTHER; note = 2'-O-methoxyethyl uridine
  modified_base 19: mod_base = OTHER; note = 2'-O-methoxyethyl guanosine
  modified_base 20: mod_base = OTHER; note = 2'-O-methoxyethyl 5-methylcytidine
  misc_feature 1: note = RNA
  misc_feature 2: note = DNA
  misc_feature 3..5: note = RNA
  misc_feature 6..9: note = DNA
  misc_feature 10: note = RNA
  misc_feature 11..16: note = DNA
  misc_feature 17..20: note = RNA
gcagaggtgaagcgaagtgc

SEQ ID NO: 367 - DNA, 20 bp, synthetic construct
  source 1..20: mol_type = other DNA
  modified_base 1: mod_base = OTHER; note = Locked nucleic acid with guanine base
  modified_base 2: mod_base = OTHER; note = 2'-deoxy 5-methylcytidine
  modified_base 3: mod_base = OTHER; note = Locked nucleic acid with adenine base
  modified_base 4: mod_base = OTHER; note = 2'-O-methoxyethyl guanosine
  modified_base 5: mod_base = OTHER; note = 2'-O-methoxyethyl adenosine
  modified_base 10: mod_base = OTHER; note = 2'-O-methoxyethyl adenosine
  modified_base 13: mod_base = OTHER; note = 2'-deoxy 5-methylcytidine
  modified_base 18: mod_base = OTHER; note = 2'-O-methoxyethyl uridine
  modified_base 19: mod_base = OTHER; note = 2'-O-methoxyethyl guanosine
  modified_base 20: mod_base = OTHER; note = 2'-O-methoxyethyl 5-methylcytidine
  misc_feature 1: note = RNA
  misc_feature 2: note = DNA
  misc_feature 3..5: note = RNA
  misc_feature 6..9: note = DNA
  misc_feature 10: note = RNA
  misc_feature 11..17: note = DNA
  misc_feature 18..20: note = RNA
gcagaggtgaagcgaagtgc

SEQ ID NO: 368 - DNA, 20 bp, synthetic construct
  source 1..20: mol_type = other DNA
  modified_base 1: mod_base = OTHER; note = Locked nucleic acid with guanine base
  modified_base 2: mod_base = OTHER; note = 2'-deoxy 5-methylcytidine
  modified_base 3: mod_base = OTHER; note = Locked nucleic acid with adenine base
  modified_base 4: mod_base = OTHER; note = 2'-O-methoxyethyl guanosine
  modified_base 5: mod_base = OTHER; note = 2'-O-methoxyethyl adenosine
  modified_base 10: mod_base = OTHER; note = 2'-O-methoxyethyl adenosine
  modified_base 13: mod_base = OTHER; note = 2'-deoxy 5-methylcytidine
  modified_base 18: mod_base = OTHER; note = 2'-O-methoxyethyl uridine
  modified_base 19: mod_base = OTHER; note = 2'-O-methoxyethyl guanosine
  modified_base 20: mod_base = OTHER; note = Locked nucleic acid with 5-methylcytidine base
  misc_feature 1: note = RNA
  misc_feature 2: note = DNA
  misc_feature 3..5: note = RNA
  misc_feature 6..9: note = DNA
  misc_feature 10: note = RNA
  misc_feature 11..17: note = DNA
  misc_feature 18..20: note = RNA
gcagaggtgaagcgaagtgc

SEQ ID NO: 369 - DNA, 20 bp, synthetic construct
  source 1..20: mol_type = other DNA
  modified_base 1: mod_base = OTHER; note = Locked nucleic acid with guanine base
  modified_base 2: mod_base = OTHER; note = 2'-deoxy 5-methylcytidine
  modified_base 3: mod_base = OTHER; note = Locked nucleic acid with adenine base
  modified_base 4: mod_base = OTHER; note = 2'-O-methoxyethyl guanosine
  modified_base 5: mod_base = OTHER; note = 2'-O-methoxyethyl adenosine
  modified_base 10: mod_base = OTHER; note = 2'-O-methoxyethyl adenosine
  modified_base 13: mod_base = OTHER; note = 2'-deoxy 5-methylcytidine
  modified_base 18: mod_base = OTHER; note = 2'-O-methoxyethyl uridine
  modified_base 19: mod_base = OTHER; note = Locked nucleic acid with guanine base
  modified_base 20: mod_base = OTHER; note = Locked nucleic acid with 5-methylcytidine base
  misc_feature 1: note = RNA
  misc_feature 2: note = DNA
  misc_feature 3..5: note = RNA
  misc_feature 6..9: note = DNA
  misc_feature 10: note = RNA
  misc_feature 11..17: note = DNA
  misc_feature 18..20: note = RNA
gcagaggtgaagcgaagtgc

SEQ ID NO: 370 - DNA, 20 bp, synthetic construct
  source 1..20: mol_type = other DNA
  modified_base 1: mod_base = OTHER; note = 2'-O-methoxyethyl guanosine
  modified_base 2: mod_base = OTHER; note = 2'-deoxy 5-methylcytidine
  modified_base 3: mod_base = OTHER; note = Locked nucleic acid with adenine base
  modified_base 4: mod_base = OTHER; note = Locked nucleic acid with guanine base
  modified_base 5: mod_base = OTHER; note = 2'-O-methoxyethyl adenosine
  modified_base 10: mod_base = OTHER; note = 2'-O-methoxyethyl adenosine
  modified_base 13: mod_base = OTHER; note = 2'-deoxy 5-methylcytidine
  modified_base 18: mod_base = OTHER; note = 2'-O-methoxyethyl uridine
  modified_base 19: mod_base = OTHER; note = Locked nucleic acid with guanine base
  modified_base 20: mod_base = OTHER; note = Locked nucleic acid with 5-methylcytidine base
  misc_feature 1: note = RNA
  misc_feature 2: note = DNA
  misc_feature 3..5: note = RNA
  misc_feature 6..9: note = DNA
  misc_feature 10: note = RNA
  misc_feature 11..17: note = DNA
  misc_feature 18..20: note = RNA
gcagaggtgaagcgaagtgc

SEQ ID NO: 371 - DNA, 20 bp, synthetic construct
  source 1..20: mol_type = other DNA
  modified_base 1: mod_base = OTHER; note = 2'-O-methoxyethyl guanosine
  modified_base 2: mod_base = OTHER; note = Locked nucleic acid with 5-methylcytidine base
  modified_base 3: mod_base = OTHER; note = Locked nucleic acid with adenine base
  modified_base 4: mod_base = OTHER; note = 2'-O-methoxyethyl guanosine
  modified_base 5: mod_base = OTHER; note = 2'-O-methoxyethyl adenosine
  modified_base 10: mod_base = OTHER; note = 2'-O-methoxyethyl adenosine
  modified_base 13: mod_base = OTHER; note = 2'-deoxy 5-methylcytidine
  modified_base 18: mod_base = OTHER; note = 2'-O-methoxyethyl uridine
  modified_base 19: mod_base = OTHER; note = Locked nucleic acid with guanine base
  modified_base 20: mod_base = OTHER; note = Locked nucleic acid with 5-methylcytidine base
  misc_feature 1..5: note = RNA
  misc_feature 6..9: note = DNA
  misc_feature 10: note = RNA
  misc_feature 11..17: note = DNA
  misc_feature 18..20: note = RNA
gcagaggtgaagcgaagtgc

SEQ ID NO: 372 - DNA, 20 bp, synthetic construct
  source 1..20: mol_type = other DNA
  modified_base 1: mod_base = OTHER; note = Locked nucleic acid with guanine base
  modified_base 2: mod_base = OTHER; note = Locked nucleic acid with 5-methylcytidine base
  modified_base 3: mod_base = OTHER; note = 2'-O-methoxyethyl adenosine
  modified_base 4: mod_base = OTHER; note = Locked nucleic acid with guanine base
  modified_base 5: mod_base = OTHER; note = 2'-O-methoxyethyl adenosine
  modified_base 10: mod_base = OTHER; note = 2'-O-methoxyethyl adenosine
  modified_base 13: mod_base = OTHER; note = 2'-deoxy 5-methylcytidine
  modified_base 17: mod_base = OTHER; note = 2'-O-methoxyethyl guanosine
  modified_base 18: mod_base = OTHER; note = 2'-O-methoxyethyl uridine
  modified_base 19: mod_base = OTHER; note = 2'-O-methoxyethyl guanosine
  modified_base 20: mod_base = OTHER; note = 2'-O-methoxyethyl 5-methylcytidine
  misc_feature 1..5: note = RNA
  misc_feature 6..9: note = DNA
  misc_feature 10: note = RNA
  misc_feature 11..16: note = DNA
  misc_feature 17..20: note = RNA
gcagaggtgaagcgaagtgc

SEQ ID NO: 373 - DNA, 20 bp, synthetic construct
  source 1..20: mol_type = other DNA
  modified_base 1: mod_base = OTHER; note = Locked nucleic acid with guanine base
  modified_base 2: mod_base = OTHER; note = Locked nucleic acid with 5-methylcytidine base
  modified_base 3: mod_base = OTHER; note = 2'-O-methoxyethyl adenosine
  modified_base 4: mod_base = OTHER; note = Locked nucleic acid with guanine base
  modified_base 5: mod_base = OTHER; note = 2'-O-methoxyethyl adenosine
  modified_base 10: mod_base = OTHER; note = 2'-O-methoxyethyl adenosine
  modified_base 13: mod_base = OTHER; note = 2'-deoxy 5-methylcytidine
  modified_base 18: mod_base = OTHER; note = 2'-O-methoxyethyl uridine
  modified_base 19: mod_base = OTHER; note = 2'-O-methoxyethyl guanosine
  modified_base 20: mod_base = OTHER; note = 2'-O-methoxyethyl 5-methylcytidine
  misc_feature 1..5: note = RNA
  misc_feature 6..9: note = DNA
  misc_feature 10: note = RNA
  misc_feature 11..17: note = DNA
  misc_feature 18..20: note = RNA
gcagaggtgaagcgaagtgc

SEQ ID NO: 374 - DNA, 20 bp, synthetic construct
  source 1..20: mol_type = other DNA
  modified_base 1: mod_base = OTHER; note = Locked nucleic acid with guanine base
  modified_base 2: mod_base = OTHER; note = Locked nucleic acid with 5-methylcytidine base
  modified_base 3: mod_base = OTHER; note = 2'-O-methoxyethyl adenosine
  modified_base 4: mod_base = OTHER; note = Locked nucleic acid with guanine base
  modified_base 5: mod_base = OTHER; note = 2'-O-methoxyethyl adenosine
  modified_base 10: mod_base = OTHER; note = 2'-O-methoxyethyl adenosine
  modified_base 13: mod_base = OTHER; note = 2'-deoxy 5-methylcytidine
  modified_base 18: mod_base = OTHER; note = 2'-O-methoxyethyl uridine
  modified_base 19: mod_base = OTHER; note = 2'-O-methoxyethyl guanosine
  modified_base 20: mod_base = OTHER; note = Locked nucleic acid with 5-methylcytidine base
  misc_feature 1..5: note = RNA
  misc_feature 6..9: note = DNA
  misc_feature 10: note = RNA
  misc_feature 11..17: note = DNA
  misc_feature 18..20: note = RNA
gcagaggtgaagcgaagtgc

SEQ ID NO: 375 - DNA, 20 bp, synthetic construct
  source 1..20: mol_type = other DNA
  modified_base 1: mod_base = OTHER; note = Locked nucleic acid with guanine base
  modified_base 2: mod_base = OTHER; note = Locked nucleic acid with 5-methylcytidine base
  modified_base 3: mod_base = OTHER; note = 2'-O-methoxyethyl adenosine
  modified_base 4: mod_base = OTHER; note = Locked nucleic acid with guanine base
  modified_base 5: mod_base = OTHER; note = 2'-O-methoxyethyl adenosine
  modified_base 10: mod_base = OTHER; note = 2'-O-methoxyethyl adenosine
  modified_base 13: mod_base = OTHER; note = 2'-deoxy 5-methylcytidine
  modified_base 19: mod_base = OTHER; note = 2'-O-methoxyethyl guanosine
  modified_base 20: mod_base = OTHER; note = Locked nucleic acid with 5-methylcytidine base
  misc_feature 1..5: note = RNA
  misc_feature 6..9: note = DNA
  misc_feature 10: note = RNA
  misc_feature 11..18: note = DNA
  misc_feature 19..20: note = RNA
gcagaggtgaagcgaagtgc

SEQ ID NO: 376 - DNA, 20 bp, synthetic construct
  source 1..20: mol_type = other DNA
  modified_base 1: mod_base = OTHER; note = Locked nucleic acid with guanine base
  modified_base 2: mod_base = OTHER; note = Locked nucleic acid with 5-methylcytidine base
  modified_base 3: mod_base = OTHER; note = 2'-O-methoxyethyl adenosine
  modified_base 4: mod_base = OTHER; note = Locked nucleic acid with guanine base
  modified_base 5: mod_base = OTHER; note = 2'-O-methoxyethyl adenosine
  modified_base 10: mod_base = OTHER; note = 2'-O-methyl adenosine
  modified_base 13: mod_base = OTHER; note = 2'-deoxy 5-methylcytidine
  modified_base 18: mod_base = OTHER; note = 2'-O-methoxyethyl uridine
  modified_base 19: mod_base = OTHER; note = 2'-O-methoxyethyl guanosine
  modified_base 20: mod_base = OTHER; note = 2'-O-methoxyethyl 5-methylcytidine
  misc_feature 1..5: note = RNA
  misc_feature 6..9: note = DNA
  misc_feature 10: note = RNA
  misc_feature 11..17: note = DNA
  misc_feature 18..20: note = RNA
gcagaggtgaagcgaagtgc

SEQ ID NO: 377 - DNA, 20 bp, synthetic construct
  source 1..20: mol_type = other DNA
  modified_base 1: mod_base = OTHER; note = Locked nucleic acid with guanine base
  modified_base 2: mod_base = OTHER; note = Locked nucleic acid with 5-methylcytidine base
  modified_base 3: mod_base = OTHER; note = 2'-O-methoxyethyl adenosine
  modified_base 4: mod_base = OTHER; note = Locked nucleic acid with guanine base
  modified_base 5: mod_base = OTHER; note = 2'-O-methoxyethyl adenosine
  modified_base 10: mod_base = OTHER; note = 2'-O-methyl adenosine
  modified_base 13: mod_base = OTHER; note = 2'-deoxy 5-methylcytidine
  modified_base 18: mod_base = OTHER; note = 2'-O-methoxyethyl uridine
  modified_base 19: mod_base = OTHER; note = 2'-O-methoxyethyl guanosine
  modified_base 20: mod_base = OTHER; note = Locked nucleic acid with 5-methylcytidine base
  misc_feature 1..5: note = RNA
  misc_feature 6..9: note = DNA
  misc_feature 10: note = RNA
  misc_feature 11..17: note = DNA
  misc_feature 18..20: note = RNA
gcagaggtgaagcgaagtgc

SEQ ID NO: 378 - DNA, 20 bp, synthetic construct
  source 1..20: mol_type = other DNA
  modified_base 1: mod_base = OTHER; note = Locked nucleic acid with guanine base
  modified_base 2: mod_base = OTHER; note = 2'-deoxy 5-methylcytidine
  modified_base 3: mod_base = OTHER; note = Locked nucleic acid with adenine base
  modified_base 4: mod_base = OTHER; note = Locked nucleic acid with guanine base
  modified_base 5: mod_base = OTHER; note = 2'-O-methoxyethyl adenosine
  modified_base 10: mod_base = OTHER; note = 2'-O-methoxyethyl adenosine
  modified_base 13: mod_base = OTHER; note = 2'-deoxy 5-methylcytidine
  modified_base 17: mod_base = OTHER; note = 2'-O-methoxyethyl guanosine
  modified_base 18: mod_base = OTHER; note = 2'-O-methoxyethyl uridine
  modified_base 19: mod_base = OTHER; note = 2'-O-methoxyethyl guanosine
  modified_base 20: mod_base = OTHER; note = 2'-O-methoxyethyl 5-methylcytidine
  misc_feature 1: note = RNA
  misc_feature 2: note = DNA
  misc_feature 3..5: note = RNA
  misc_feature 6..9: note = DNA
  misc_feature 10: note = RNA
  misc_feature 11..16: note = DNA
  misc_feature 17..20: note = RNA
gcagaggtgaagcgaagtgc

SEQ ID NO: 379 - DNA, 20 bp, synthetic construct
  source 1..20: mol_type = other DNA
  modified_base 1: mod_base = OTHER; note = Locked nucleic acid with guanine base
  modified_base 2: mod_base = OTHER; note = 2'-deoxy 5-methylcytidine
  modified_base 3: mod_base = OTHER; note = Locked nucleic acid with adenine base
  modified_base 4: mod_base = OTHER; note = Locked nucleic acid with guanine base
  modified_base 5: mod_base = OTHER; note = 2'-O-methoxyethyl adenosine
  modified_base 10: mod_base = OTHER; note = 2'-O-methoxyethyl adenosine
  modified_base 13: mod_base = OTHER; note = 2'-deoxy 5-methylcytidine
  modified_base 18: mod_base = OTHER; note = 2'-O-methoxyethyl uridine
  modified_base 19: mod_base = OTHER; note = 2'-O-methoxyethyl guanosine
  modified_base 20: mod_base = OTHER; note = 2'-O-methoxyethyl 5-methylcytidine
  misc_feature 1: note = RNA
  misc_feature 2: note = DNA
  misc_feature 3..5: note = RNA
  misc_feature 6..9: note = DNA
  misc_feature 10: note = RNA
  misc_feature 11..17: note = DNA
  misc_feature 18..20: note = RNA
gcagaggtgaagcgaagtgc

SEQ ID NO: 380 - DNA, 20 bp, synthetic construct
  source 1..20: mol_type = other DNA
  modified_base 1: mod_base = OTHER; note = Locked nucleic acid with guanine base
  modified_base 2: mod_base = OTHER; note = 2'-deoxy 5-methylcytidine
  modified_base 3: mod_base = OTHER; note = Locked nucleic acid with adenine base
  modified_base 4: mod_base = OTHER; note = Locked nucleic acid with guanine base
  modified_base 5: mod_base = OTHER; note = 2'-O-methoxyethyl adenosine
  modified_base 10: mod_base = OTHER; note = 2'-O-methoxyethyl adenosine
  modified_base 13: mod_base = OTHER; note = 2'-deoxy 5-methylcytidine
  modified_base 19: mod_base = OTHER; note = 2'-O-methoxyethyl guanosine
  modified_base 20: mod_base = OTHER; note = Locked nucleic acid with 5-methylcytidine base
  misc_feature 1: note = RNA
  misc_feature 2: note = DNA
  misc_feature 3..5: note = RNA
  misc_feature 6..9: note = DNA
  misc_feature 10: note = RNA
  misc_feature 11..18: note = DNA
  misc_feature 19..20: note = RNA
gcagaggtgaagcgaagtgc

SEQ ID NO: 381 - DNA, 16 bp, synthetic construct
  source 1..16: mol_type = other DNA
  modified_base 1: mod_base = OTHER; note = 2'-O-methoxyethyl guanosine
  modified_base 2: mod_base = OTHER; note = 2'-O-methoxyethyl thymidine
  modified_base 3: mod_base = OTHER; note = 2'-O-methoxyethyl 5-methylcytidine
  modified_base 8: mod_base = OTHER; note = 2'-deoxy 5-methylcytidine
  modified_base 11: mod_base = OTHER; note = 2'-deoxy 5-methylcytidine
  modified_base 13: mod_base = OTHER; note = 2'-deoxy 5-methylcytidine
  modified_base 14: mod_base = OTHER; note = 2'-O-methoxyethyl thymidine
  modified_base 15: mod_base = OTHER; note = 2'-O-methoxyethyl 5-methylcytidine
  modified_base 16: mod_base = OTHER; note = 2'-O-methoxyethyl 5-methylcytidine
  misc_feature 1..3: note = RNA
  misc_feature 4..13: note = DNA
  misc_feature 14..16: note = RNA
gtctgtgcatctctcc

SEQ ID NO: 382 - DNA, 16 bp, synthetic construct
  source 1..16: mol_type = other DNA
  modified_base 1: mod_base = OTHER; note = Locked nucleic acid with guanine base
  modified_base 2: mod_base = OTHER; note = Locked nucleic acid with thymine base
  modified_base 3: mod_base = OTHER; note = Locked nucleic acid with 5-methylcytidine base
  modified_base 8: mod_base = OTHER; note = 2'-deoxy 5-methylcytidine
  modified_base 11: mod_base = OTHER; note = 2'-deoxy 5-methylcytidine
  modified_base 13: mod_base = OTHER; note = 2'-deoxy 5-methylcytidine
  modified_base 14: mod_base = OTHER; note = Locked nucleic acid with thymine base
  modified_base 15: mod_base = OTHER; note = Locked nucleic acid with 5-methylcytidine base
  modified_base 16: mod_base = OTHER; note = Locked nucleic acid with 5-methylcytidine base
  misc_feature 1..3: note = RNA
  misc_feature 4..13: note = DNA
  misc_feature 14..16: note = RNA
gtctgtgcatctctcc

SEQ ID NO: 383 - DNA, 18 bp, synthetic construct
  source 1..18: mol_type = other DNA
  modified_base 1: mod_base = OTHER; note = 2'-O-methoxyethyl guanosine
  modified_base 2: mod_base = OTHER; note = 2'-O-methoxyethyl 5-methylcytidine
  modified_base 4: mod_base = OTHER; note = 2'-deoxy 5-methylcytidine
  modified_base 8: mod_base = OTHER; note = 2'-deoxy 5-methylcytidine
  modified_base 10: mod_base = OTHER; note = 2'-deoxy 5-methylcytidine
  modified_base 16: mod_base = OTHER; note = 2'-deoxy 5-methylcytidine
  modified_base 17: mod_base = OTHER; note = 2'-O-methoxyethyl 5-methylcytidine
  modified_base 18: mod_base = OTHER; note = 2'-O-methoxyethyl adenosine
  misc_feature 1..2: note = RNA
  misc_feature 3..16: note = DNA
  misc_feature 17..18: note = RNA
gctcatactcgtaggcca

SEQ ID NO: 384 - DNA, 18 bp, synthetic construct
  source 1..18: mol_type = other DNA
  modified_base 1: mod_base = OTHER; note = Locked nucleic acid with guanine base
  modified_base 2: mod_base = OTHER; note = Locked nucleic acid with 5-methylcytidine base
  modified_base 4: mod_base = OTHER; note = 2'-deoxy 5-methylcytidine
  modified_base 8: mod_base = OTHER; note = 2'-deoxy 5-methylcytidine
  modified_base 10: mod_base = OTHER; note = 2'-deoxy 5-methylcytidine
  modified_base 16: mod_base = OTHER; note = 2'-deoxy 5-methylcytidine
  modified_base 17: mod_base = OTHER; note = Locked nucleic acid with 5-methylcytidine base
  modified_base 18: mod_base = OTHER; note = Locked nucleic acid with adenine base
  misc_feature 1..2: note = RNA
  misc_feature 3..16: note = DNA
  misc_feature 17..18: note = RNA
gctcatactcgtaggcca

SEQ ID NO: 385 - DNA, 20 bp, synthetic construct
  source 1..20: mol_type = other DNA
  modified_base 1: mod_base = OTHER; note = 2'-O-methoxyethyl guanosine
  modified_base 2: mod_base = OTHER; note = 2'-O-methoxyethyl 5-methylcytidine
  modified_base 3: mod_base = OTHER; note = 2'-O-methoxyethyl adenosine
  modified_base 4: mod_base = OTHER; note = 2'-O-methoxyethyl guanosine
  modified_base 5: mod_base = OTHER; note = 2'-O-methoxyethyl adenosine
  modified_base 10: mod_base = OTHER; note = 2'-O-methoxyethyl adenosine
  modified_base 13: mod_base = OTHER; note = 2'-deoxy 5-methylcytidine
  modified_base 16: mod_base = OTHER; note = 2'-O-methoxyethyl adenosine
  modified_base 17: mod_base = OTHER; note = 2'-O-methoxyethyl guanosine
  modified_base 18: mod_base = OTHER; note = 2'-O-methoxyethyl thymidine
  modified_base 19: mod_base = OTHER; note = Locked nucleic acid with guanine base
  modified_base 20: mod_base = OTHER; note = Locked nucleic acid with 5-methylcytidine base
  misc_feature 1..5: note = RNA
  misc_feature 6..9: note = DNA
  misc_feature 10: note = RNA
  misc_feature 11..15: note = DNA
  misc_feature 16..20: note = RNA
gcagaggtgaagcgaagtgc

SEQ ID NO: 386 - DNA, 20 bp, synthetic construct
  source 1..20: mol_type = other DNA
  modified_base 1: mod_base = OTHER; note = 2'-O-methoxyethyl guanosine
  modified_base 2: mod_base = OTHER; note = 2'-O-methoxyethyl 5-methylcytidine
  modified_base 3: mod_base = OTHER; note = 2'-O-methoxyethyl adenosine
  modified_base 4: mod_base = OTHER; note = 2'-O-methoxyethyl guanosine
  modified_base 5: mod_base = OTHER; note = 2'-O-methoxyethyl adenosine
  modified_base 10: mod_base = OTHER; note = 2'-O-methoxyethyl adenosine
  modified_base 13: mod_base = OTHER; note = 2'-deoxy 5-methylcytidine
  modified_base 16: mod_base = OTHER; note = 2'-O-methoxyethyl adenosine
  modified_base 17: mod_base = OTHER; note = 2'-O-methoxyethyl guanosine
  modified_base 18: mod_base = OTHER; note = Locked nucleic acid with thymine base
  modified_base 19: mod_base = OTHER; note = 2'-O-methoxyethyl guanosine
  modified_base 20: mod_base = OTHER; note = Locked nucleic acid with 5-methylcytidine base
  misc_feature 1..5: note = RNA
  misc_feature 6..9: note = DNA
  misc_feature 10: note = RNA
  misc_feature 11..15: note = DNA
  misc_feature 16..20: note = RNA
gcagaggtgaagcgaagtgc

SEQ ID NO: 387 - DNA, 20 bp, synthetic construct
  source 1..20: mol_type = other DNA
  modified_base 1: mod_base = OTHER; note = 2'-O-methoxyethyl guanosine
  modified_base 2: mod_base = OTHER; note = 2'-O-methoxyethyl 5-methylcytidine
  modified_base 3: mod_base = OTHER; note = 2'-O-methoxyethyl adenosine
  modified_base 4: mod_base = OTHER; note = 2'-O-methoxyethyl guanosine
  modified_base 5: mod_base = OTHER; note = 2'-O-methoxyethyl adenosine
  modified_base 10: mod_base = OTHER; note = 2'-O-methoxyethyl adenosine
  modified_base 13: mod_base = OTHER; note = 2'-deoxy 5-methylcytidine
  modified_base 16: mod_base = OTHER; note = 2'-O-methoxyethyl adenosine
  modified_base 17: mod_base = OTHER; note = Locked nucleic acid with guanine base
  modified_base 18: mod_base = OTHER; note = 2'-O-methoxyethyl thymidine
  modified_base 19: mod_base = OTHER; note = 2'-O-methoxyethyl guanosine
  modified_base 20: mod_base = OTHER; note = Locked nucleic acid with 5-methylcytidine base
  misc_feature 1..5: note = RNA
  misc_feature 6..9: note = DNA
  misc_feature 10: note = RNA
  misc_feature 11..15: note = DNA
  misc_feature 16..20: note = RNA
gcagaggtgaagcgaagtgc

SEQ ID NO: 388 - DNA, 20 bp, synthetic construct
  source 1..20: mol_type = other DNA
  modified_base 1: mod_base = OTHER; note = 2'-O-methoxyethyl guanosine
  modified_base 2: mod_base = OTHER; note = 2'-O-methoxyethyl 5-methylcytidine
  modified_base 3: mod_base = OTHER; note = 2'-O-methoxyethyl adenosine
  modified_base 4: mod_base = OTHER; note = 2'-O-methoxyethyl guanosine
  modified_base 5: mod_base = OTHER; note = 2'-O-methoxyethyl adenosine
  modified_base 10: mod_base = OTHER; note = 2'-O-methoxyethyl adenosine
  modified_base 13: mod_base = OTHER; note = 2'-deoxy 5-methylcytidine
  modified_base 16: mod_base = OTHER; note = 2'-O-methoxyethyl adenosine
  modified_base 17: mod_base = OTHER; note = 2'-O-methoxyethyl guanosine
  modified_base 18: mod_base = OTHER; note = Locked nucleic acid with thymine base
  modified_base 19: mod_base = OTHER; note = Locked nucleic acid with guanine base
  modified_base 20: mod_base = OTHER; note = 2'-O-methoxyethyl 5-methylcytidine
  misc_feature 1..5: note = RNA
  misc_feature 6..9: note = DNA
  misc_feature 10: note = RNA
  misc_feature 11..15: note = DNA
  misc_feature 16..20: note = RNA
gcagaggtgaagcgaagtgc

SEQ ID NO: 389 - DNA, 20 bp, synthetic construct
  source 1..20: mol_type = other DNA
  modified_base 1: mod_base = OTHER; note = 2'-O-methoxyethyl guanosine
  modified_base 2: mod_base = OTHER; note = 2'-O-methoxyethyl 5-methylcytidine
  modified_base 3: mod_base = OTHER; note = 2'-O-methoxyethyl adenosine
  modified_base 4: mod_base = OTHER; note = 2'-O-methoxyethyl guanosine
  modified_base 5: mod_base = OTHER; note = 2'-O-methoxyethyl adenosine
  modified_base 10: mod_base = OTHER; note = 2'-O-methoxyethyl adenosine
  modified_base 13: mod_base = OTHER; note = 2'-deoxy 5-methylcytidine
  modified_base 16: mod_base = OTHER; note = 2'-O-methoxyethyl adenosine
  modified_base 17: mod_base = OTHER; note = Locked nucleic acid with guanine base
  modified_base 18: mod_base = OTHER; note = 2'-O-methoxyethyl thymidine
  modified_base 19: mod_base = OTHER; note = Locked nucleic acid with guanine base
  modified_base 20: mod_base = OTHER; note = 2'-O-methoxyethyl 5-methylcytidine
  misc_feature 1..5: note = RNA
  misc_feature 6..9: note = DNA
  misc_feature 10: note = RNA
  misc_feature 11..15: note = DNA
  misc_feature 16..20: note = RNA
gcagaggtgaagcgaagtgc

SEQ ID NO: 390 - DNA, 20 bp, synthetic construct
  source 1..20: mol_type = other DNA
  modified_base 1: mod_base = OTHER; note = 2'-O-methoxyethyl guanosine
  modified_base 2: mod_base = OTHER; note = 2'-O-methoxyethyl 5-methylcytidine
  modified_base 3: mod_base = OTHER; note = 2'-O-methoxyethyl adenosine
  modified_base 4: mod_base = OTHER; note = 2'-O-methoxyethyl guanosine
  modified_base 5: mod_base = OTHER; note = 2'-O-methoxyethyl adenosine
  modified_base 10: mod_base = OTHER; note = 2'-O-methoxyethyl adenosine
  modified_base 13: mod_base = OTHER; note = 2'-deoxy 5-methylcytidine
  modified_base 16: mod_base = OTHER; note = 2'-O-methoxyethyl adenosine
  modified_base 17: mod_base = OTHER; note = Locked nucleic acid with guanine base
  modified_base 18: mod_base = OTHER; note = Locked nucleic acid with thymine base
  modified_base 19: mod_base = OTHER; note = 2'-O-methoxyethyl guanosine
  modified_base 20: mod_base = OTHER; note = 2'-O-methoxyethyl 5-methylcytidine
  misc_feature 1..5: note = RNA
  misc_feature 6..9: note = DNA
  misc_feature 10: note = RNA
  misc_feature 11..15: note = DNA
  misc_feature 16..20: note = RNA
gcagaggtgaagcgaagtgc

SEQ ID NO: 391 - DNA, 20 bp, synthetic construct
  source 1..20: mol_type = other DNA
  modified_base 1: mod_base = OTHER; note = 2'-O-methoxyethyl guanosine
  modified_base 2: mod_base = OTHER; note = 2'-O-methoxyethyl 5-methylcytidine
  modified_base 3: mod_base = OTHER; note = 2'-O-methoxyethyl adenosine
  modified_base 4: mod_base = OTHER; note = 2'-O-methoxyethyl guanosine
  modified_base 5: mod_base = OTHER; note = 2'-O-methoxyethyl adenosine
  modified_base 10: mod_base = OTHER; note = 2'-O-methyl adenosine
  modified_base 13: mod_base = OTHER; note = 2'-deoxy 5-methylcytidine
  modified_base 16: mod_base = OTHER; note = 2'-O-methoxyethyl adenosine
  modified_base 17: mod_base = OTHER; note = 2'-O-methoxyethyl guanosine
  modified_base 18: mod_base = OTHER; note = 2'-O-methoxyethyl thymidine
  modified_base 19: mod_base = OTHER; note = Locked nucleic acid with guanine base
  modified_base 20: mod_base = OTHER; note = Locked nucleic acid with 5-methylcytidine base
  misc_feature 1..5: note = RNA
  misc_feature 6..9: note = DNA
  misc_feature 10: note = RNA
  misc_feature 11..15: note = DNA
  misc_feature 16..20: note = RNA
gcagaggtgaagcgaagtgc

SEQ ID NO: 392 - DNA, 20 bp, synthetic construct
  source 1..20: mol_type = other DNA
  modified_base 1: mod_base = OTHER; note = 2'-O-methoxyethyl guanosine
  modified_base 2: mod_base = OTHER; note = 2'-O-methoxyethyl 5-methylcytidine
  modified_base 3: mod_base = OTHER; note = 2'-O-methoxyethyl adenosine
  modified_base 4: mod_base = OTHER; note = 2'-O-methoxyethyl guanosine
  modified_base 10: mod_base = OTHER; note = 2'-O-methoxyethyl adenosine
  modified_base 13: mod_base = OTHER; note = 2'-deoxy 5-methylcytidine
  modified_base 16: mod_base = OTHER; note = 2'-O-methoxyethyl adenosine
  modified_base 17: mod_base = OTHER; note = 2'-O-methoxyethyl guanosine
  modified_base 18: mod_base = OTHER; note = 2'-O-methoxyethyl thymidine
  modified_base 19: mod_base = OTHER; note = Locked nucleic acid with guanine base
  modified_base 20: mod_base = OTHER; note = Locked nucleic acid with 5-methylcytidine base
  misc_feature 1..4: note = RNA
  misc_feature 5..9: note = DNA
  misc_feature 10: note = RNA
  misc_feature 11..15: note = DNA
  misc_feature 16..20: note = RNA
gcagaggtgaagcgaagtgc

SEQ ID NO: 393 - DNA, 20 bp, synthetic construct
  source 1..20: mol_type = other DNA
  modified_base 1: mod_base = OTHER; note = 2'-O-methoxyethyl guanosine
  modified_base 2: mod_base = OTHER; note = 2'-O-methoxyethyl 5-methylcytidine
  modified_base 3: mod_base = OTHER; note = 2'-O-methoxyethyl adenosine
  modified_base 4: mod_base = OTHER; note = 2'-O-methoxyethyl guanosine
  modified_base 5: mod_base = OTHER; note = 2'-O-methoxyethyl adenosine
  modified_base 10: mod_base = OTHER; note = 2'-O-methoxyethyl adenosine
  modified_base 13: mod_base = OTHER; note = 2'-deoxy 5-methylcytidine
  modified_base 17: mod_base = OTHER; note = 2'-O-methoxyethyl guanosine
  modified_base 18: mod_base = OTHER; note = 2'-O-methoxyethyl thymidine
  modified_base 19: mod_base = OTHER; note = Locked nucleic acid with guanine base
  modified_base 20: mod_base = OTHER; note = Locked nucleic acid with 5-methylcytidine base
  misc_feature 1..5: note = RNA
  misc_feature 6..9: note = DNA
  misc_feature 10: note = RNA
  misc_feature 11..16: note = DNA
  misc_feature 17..20: note = RNA
gcagaggtgaagcgaagtgc

SEQ ID NO: 394 - DNA, 20 bp, synthetic construct
  source 1..20: mol_type = other DNA
  modified_base 1: mod_base = OTHER; note = 2'-O-methoxyethyl guanosine
  modified_base 2: mod_base = OTHER; note = 2'-O-methoxyethyl 5-methylcytidine
  modified_base 3: mod_base = OTHER; note = 2'-O-methoxyethyl adenosine
  modified_base 4: mod_base = OTHER; note = 2'-O-methoxyethyl guanosine
  modified_base 10: mod_base = OTHER; note = 2'-O-methyl adenosine
  modified_base 13: mod_base = OTHER; note = 2'-deoxy 5-methylcytidine
  modified_base 16: mod_base = OTHER; note = 2'-O-methoxyethyl adenosine
  modified_base 17: mod_base = OTHER; note = 2'-O-methoxyethyl guanosine
  modified_base 18: mod_base = OTHER; note = 2'-O-methoxyethyl thymidine
  modified_base 19: mod_base = OTHER; note = Locked nucleic acid with guanine base
  modified_base 20: mod_base = OTHER; note = Locked nucleic acid with 5-methylcytidine base
  misc_feature 1..4: note = RNA
  misc_feature 5..9: note = DNA
  misc_feature 10: note = RNA
  misc_feature 11..15: note = DNA
  misc_feature 16..20: note = RNA
gcagaggtgaagcgaagtgc

SEQ ID NO: 395 - DNA, 20 bp, synthetic construct
  source 1..20: mol_type = other DNA
  modified_base 1: mod_base = OTHER; note = 2'-O-methoxyethyl guanosine
  modified_base 2: mod_base = OTHER; note = 2'-O-methoxyethyl 5-methylcytidine
  modified_base 3: mod_base = OTHER; note = 2'-O-methoxyethyl adenosine
  modified_base 4: mod_base = OTHER; note = 2'-O-methoxyethyl guanosine
  modified_base 5: mod_base = OTHER; note = 2'-O-methoxyethyl adenosine
  modified_base 10: mod_base = OTHER; note = 2'-O-methyl adenosine
  modified_base 13: mod_base = OTHER; note = 2'-deoxy 5-methylcytidine
  modified_base 17: mod_base = OTHER; note = 2'-O-methoxyethyl guanosine
  modified_base 18: mod_base = OTHER; note = 2'-O-methoxyethyl thymidine
  modified_base 19: mod_base = OTHER; note = Locked nucleic acid with guanine base
  modified_base 20: mod_base = OTHER; note = Locked nucleic acid with 5-methylcytidine base
  misc_feature 1..5: note = RNA
  misc_feature 6..9: note = DNA
  misc_feature 10: note = RNA
  misc_feature 11..16: note = DNA
  misc_feature 17..20: note = RNA
gcagaggtgaagcgaagtgc

SEQ ID NO: 396 - DNA, 20 bp, synthetic construct
  source 1..20: mol_type = other DNA
  modified_base 1: mod_base = OTHER; note = Locked nucleic acid with guanine base
  modified_base 2: mod_base = OTHER; note = 2'-deoxy 5-methylcytidine
  modified_base 3: mod_base = OTHER; note = Locked nucleic acid with adenine base
  modified_base 4: mod_base = OTHER; note = 2'-O-methoxyethyl guanosine
  modified_base 10: mod_base = OTHER; note = 2'-O-methoxyethyl adenosine
  modified_base 13: mod_base = OTHER; note = 2'-deoxy 5-methylcytidine
  modified_base 17: mod_base = OTHER; note = 2'-O-methoxyethyl guanosine
  modified_base 18: mod_base = OTHER; note = 2'-O-methoxyethyl thymidine
  modified_base 19: mod_base = OTHER; note = 2'-O-methoxyethyl guanosine
  modified_base 20: mod_base = OTHER; note = 2'-O-methoxyethyl 5-methylcytidine
  misc_feature 1: note = RNA
  misc_feature 2: note = DNA
  misc_feature 3..4: note = RNA
  misc_feature 5..9: note = DNA
  misc_feature 10: note = RNA
  misc_feature 11..16: note = DNA
  misc_feature 17..20: note = RNA
gcagaggtgaagcgaagtgc

SEQ ID NO: 397 - DNA, 20 bp, synthetic construct
  source 1..20: mol_type = other DNA
  modified_base 1: mod_base = OTHER; note = Locked nucleic acid with guanine base
  modified_base 2: mod_base = OTHER; note = 2'-O-methoxyethyl 5-methylcytidine
  modified_base 3: mod_base = OTHER; note = Locked nucleic acid with adenine base
  modified_base 4: mod_base = OTHER; note = 2'-O-methoxyethyl guanosine
  modified_base 5: mod_base = OTHER; note = 2'-O-methoxyethyl adenosine
  modified_base 10: mod_base = OTHER; note = 2'-O-methoxyethyl adenosine
  modified_base 13: mod_base = OTHER; note = 2'-deoxy 5-methylcytidine
  modified_base 16: mod_base = OTHER; note = 2'-O-methoxyethyl adenosine
  modified_base 17: mod_base = OTHER; note = 2'-O-methoxyethyl guanosine
  modified_base 18: mod_base = OTHER; note = 2'-O-methoxyethyl thymidine
  modified_base 19: mod_base = OTHER; note = 2'-O-methoxyethyl guanosine
  modified_base 20: mod_base = OTHER; note = 2'-O-methoxyethyl 5-methylcytidine
  misc_feature 1..5: note = RNA
  misc_feature 6..9: note = DNA
  misc_feature 10: note = RNA
  misc_feature 11..15: note = DNA
  misc_feature 16..20: note = RNA
gcagaggtgaagcgaagtgc

SEQ ID NO: 398 - DNA, 20 bp, synthetic construct
  source 1..20: mol_type = other DNA
  modified_base 1: mod_base = OTHER; note = Locked nucleic acid with guanine base
  modified_base 2: mod_base = OTHER; note = 2'-O-methoxyethyl 5-methylcytidine
  modified_base 3: mod_base = OTHER; note = Locked nucleic acid with adenine base
  modified_base 4: mod_base = OTHER; note = 2'-O-methoxyethyl guanosine
  modified_base 5: mod_base = OTHER; note = 2'-O-methoxyethyl adenosine
  modified_base 10: mod_base = OTHER; note = 2'-O-methyl adenosine
  modified_base 13: mod_base = OTHER; note = 2'-deoxy 5-methylcytidine
  modified_base 16: mod_base = OTHER; note = 2'-O-methoxyethyl adenosine
  modified_base 17: mod_base = OTHER; note = 2'-O-methoxyethyl guanosine
  modified_base 18: mod_base = OTHER; note = 2'-O-methoxyethyl thymidine
  modified_base 19: mod_base = OTHER; note = 2'-O-methoxyethyl guanosine
  modified_base 20: mod_base = OTHER; note = 2'-O-methoxyethyl 5-methylcytidine
  misc_feature 1..5: note = RNA
  misc_feature 6..9: note = DNA
  misc_feature 10: note = RNA
  misc_feature 11..15: note = DNA
  misc_feature 16..20: note = RNA
gcagaggtgaagcgaagtgc

SEQ ID NO: 399 - DNA, 20 bp, synthetic construct
  source 1..20: mol_type = other DNA
  modified_base 1: mod_base = OTHER; note = Locked nucleic acid with guanine base
  modified_base 2: mod_base = OTHER; note = 2'-O-methoxyethyl 5-methylcytidine
  modified_base 3: mod_base = OTHER; note = Locked nucleic acid with adenine base
  modified_base 4: mod_base = OTHER; note = 2'-O-methoxyethyl guanosine
  modified_base 10: mod_base = OTHER; note = 2'-O-methyl adenosine
  modified_base 13: mod_base = OTHER; note = 2'-deoxy 5-methylcytidine
  modified_base 16: mod_base = OTHER; note = 2'-O-methoxyethyl adenosine
  modified_base 17: mod_base = OTHER; note = 2'-O-methoxyethyl guanosine
  modified_base 18: mod_base = OTHER; note = 2'-O-methoxyethyl thymidine
  modified_base 19: mod_base = OTHER; note = 2'-O-methoxyethyl guanosine
  modified_base 20: mod_base = OTHER; note = 2'-O-methoxyethyl 5-methylcytidine
  misc_feature 1..4: note = RNA
  misc_feature 5..9: note = DNA
  misc_feature 10: note = RNA
  misc_feature 11..15: note = DNA
  misc_feature 16..20: note = RNA
gcagaggtgaagcgaagtgc

SEQ ID NO: 400 - DNA, 20 bp, synthetic construct
  source 1..20: mol_type = other DNA
  modified_base 1: mod_base = OTHER; note = Locked nucleic acid with guanine base
  modified_base 2: mod_base = OTHER; note = 2'-O-methoxyethyl 5-methylcytidine
  modified_base 3: mod_base = OTHER; note = Locked nucleic acid with adenine base
  modified_base 4: mod_base = OTHER; note = 2'-O-methoxyethyl guanosine
  modified_base 10: mod_base = OTHER; note = 2'-O-methyl adenosine
  modified_base 13: mod_base = OTHER; note = 2'-deoxy 5-methylcytidine
  modified_base 16: mod_base = OTHER; note = 2'-O-methoxyethyl adenosine
  modified_base 17: mod_base = OTHER; note = 2'-O-methoxyethyl guanosine
  modified_base 18: mod_base = OTHER; note = 2'-O-methoxyethyl thymidine
  modified_base 19: mod_base = OTHER; note = 2'-O-methoxyethyl guanosine
  modified_base 20: mod_base = OTHER; note = 2'-O-methoxyethyl 5-methylcytidine
  misc_feature 1..4: note = RNA
  misc_feature 5..9: note = DNA
  misc_feature 10: note = RNA
  misc_feature 11..15: note = DNA
  misc_feature 16..20: note = RNA
gcagaggtgaagcgaagtgc

SEQ ID NO: 401 - DNA, 20 bp, synthetic construct
  source 1..20: mol_type = other DNA
  modified_base 1: mod_base = OTHER; note = Locked nucleic acid with guanine base
  modified_base 2: mod_base = OTHER; note = 2'-O-methoxyethyl 5-methylcytidine
  modified_base 3: mod_base = OTHER; note = Locked nucleic acid with adenine base
  modified_base 4: mod_base = OTHER; note = 2'-O-methoxyethyl guanosine
  modified_base 5: mod_base = OTHER; note = 2'-O-methoxyethyl adenosine
  modified_base 10: mod_base = OTHER; note = 2'-O-methoxyethyl adenosine
  modified_base 13: mod_base = OTHER; note = 2'-deoxy 5-methylcytidine
  modified_base 17: mod_base = OTHER; note = 2'-O-methoxyethyl guanosine
  modified_base 18: mod_base = OTHER; note = 2'-O-methoxyethyl thymidine
  modified_base 19: mod_base = OTHER; note = 2'-O-methoxyethyl guanosine
  modified_base 20: mod_base = OTHER; note = 2'-O-methoxyethyl 5-methylcytidine
  misc_feature 1..5: note = RNA
  misc_feature 6..9: note = DNA
  misc_feature 10: note = RNA
  misc_feature 11..16: note = DNA
  misc_feature 17..20: note = RNA
gcagaggtgaagcgaagtgc

SEQ ID NO: 402 - DNA, 20 bp, synthetic construct
  source 1..20: mol_type = other DNA
  modified_base 1: mod_base = OTHER; note = Locked nucleic acid with guanine base
  modified_base 2: mod_base = OTHER; note = 2'-deoxy 5-methylcytidine
  modified_base 3: mod_base = OTHER; note = Locked nucleic acid with adenine base
  modified_base 4: mod_base = OTHER; note = 2'-O-methoxyethyl guanosine
  modified_base 5: mod_base = OTHER; note = 2'-O-methoxyethyl adenosine
  modified_base 10: mod_base = OTHER; note = 2'-O-methoxyethyl adenosine
  modified_base 13: mod_base = OTHER; note = 2'-deoxy 5-methylcytidine
  modified_base 16: mod_base = OTHER; note = 2'-O-methoxyethyl adenosine
  modified_base 17: mod_base = OTHER; note = 2'-O-methoxyethyl guanosine
  modified_base 18: mod_base = OTHER; note = 2'-O-methoxyethyl thymidine
  modified_base 19: mod_base = OTHER; note = 2'-O-methoxyethyl guanosine
  modified_base 20: mod_base = OTHER; note = 2'-O-methoxyethyl 5-methylcytidine
  misc_feature 1: note = RNA
  misc_feature 2: note = DNA
  misc_feature 3..5: note = RNA
  misc_feature 6..9: note = DNA
  misc_feature 10: note = RNA
  misc_feature 11..15: note = DNA
  misc_feature 16..20: note = RNA
gcagaggtgaagcgaagtgc

SEQ ID NO: 403 - DNA, 20 bp, synthetic construct
  source 1..20: mol_type = other DNA
  modified_base 1: mod_base = OTHER; note = Locked nucleic acid with guanine base
  modified_base 2: mod_base = OTHER; note = 2'-deoxy 5-methylcytidine
  modified_base 3: mod_base = OTHER; note = Locked nucleic acid with adenine base
  modified_base 4: mod_base = OTHER; note = 2'-O-methoxyethyl guanosine
  modified_base 5: mod_base = OTHER; note = 2'-O-methoxyethyl adenosine
  modified_base 10: mod_base = OTHER; note = 2'-O-methoxyethyl adenosine
  modified_base 13: mod_base = OTHER; note = 2'-deoxy 5-methylcytidine
  modified_base 17: mod_base = OTHER; note = 2'-O-methoxyethyl guanosine
  modified_base 18: mod_base = OTHER; note = 2'-O-methoxyethyl thymidine
  modified_base 19: mod_base = OTHER; note = 2'-O-methoxyethyl guanosine
  modified_base 20: mod_base = OTHER; note = 2'-O-methoxyethyl 5-methylcytidine
  misc_feature 1: note = RNA
  misc_feature 2: note = DNA
  misc_feature 3..5: note = RNA
  misc_feature 6..9: note = DNA
  misc_feature 10: note = RNA
  misc_feature 11..16: note = DNA
  misc_feature 17..20: note = RNA
gcagaggtgaagcgaagtgc

SEQ ID NO: 404 - DNA, 20 bp, synthetic construct
  source 1..20: mol_type = other DNA
  modified_base 1: mod_base = OTHER; note = Locked nucleic acid with guanine base
  modified_base 2: mod_base = OTHER; note = 2'-deoxy 5-methylcytidine
  modified_base 3: mod_base = OTHER; note = Locked nucleic acid with adenine base
  modified_base 4: mod_base = OTHER; note = 2'-O-methoxyethyl guanosine
  modified_base 10: mod_base = OTHER; note = 2'-O-methoxyethyl adenosine
  modified_base 13: mod_base = OTHER; note = 2'-deoxy 5-methylcytidine
  modified_base 16: mod_base = OTHER; note = 2'-O-methoxyethyl adenosine
  modified_base 17: mod_base = OTHER; note = 2'-O-methoxyethyl guanosine
  modified_base 18: mod_base = OTHER; note = 2'-O-methoxyethyl thymidine
  modified_base 19: mod_base = OTHER; note = 2'-O-methoxyethyl guanosine
  modified_base 20: mod_base = OTHER; note = 2'-O-methoxyethyl 5-methylcytidine
  misc_feature 1: note = RNA
  misc_feature 2: note = DNA
  misc_feature 3..4: note = RNA
  misc_feature 5..9: note = DNA
  misc_feature 10: note = RNA
  misc_feature 11..15: note = DNA
  misc_feature 16..20: note = RNA
gcagaggtgaagcgaagtgc

SEQ ID NO: 405 - DNA, 20 bp, synthetic construct
  source 1..20: mol_type = other DNA
  modified_base 1: mod_base = OTHER; note = 2'-O-methoxyethyl guanosine
  modified_base 2: mod_base = OTHER; note = 2'-O-methoxyethyl 5-methylcytidine
  modified_base 3: mod_base = OTHER; note = 2'-O-methoxyethyl adenosine
  modified_base 4: mod_base = OTHER; note = 2'-O-methoxyethyl guanosine
  modified_base 5: mod_base = OTHER; note = 2'-O-methoxyethyl adenosine
  modified_base 13: mod_base = OTHER; note = 2'-deoxy 5-methylcytidine
  modified_base 16: mod_base = OTHER; note = 2'-O-methoxyethyl adenosine
  modified_base 17: mod_base = OTHER; note = 2'-O-methoxyethyl guanosine
  modified_base 18: mod_base = OTHER; note = 2'-O-methoxyethyl thymidine
  modified_base 19: mod_base = OTHER; note = 2'-O-methoxyethyl guanosine
  modified_base 20: mod_base = OTHER; note = 2'-O-methoxyethyl 5-methylcytidine
  misc_feature 1..5: note = RNA
  misc_feature 6..15: note = DNA
  misc_feature 16..20: note = RNA
gcagaggtgaagcgaagtgc

SEQ ID NO: 406 - DNA, 20 bp, synthetic construct
  source 1..20: mol_type = other DNA
  modified_base 1: mod_base = OTHER; note = Locked nucleic acid with guanine base
  modified_base 2: mod_base = OTHER; note = 2'-O-methoxyethyl 5-methylcytidine
  modified_base 3: mod_base = OTHER; note = Locked nucleic acid with adenine base
  modified_base 5: mod_base = OTHER; note = 2'-O-methoxyethyl adenosine
  modified_base 10: mod_base = OTHER; note = 2'-O-methoxyethyl adenosine
  modified_base 13: mod_base = OTHER; note = 2'-deoxy 5-methylcytidine
  modified_base 16: mod_base = OTHER; note = 2'-O-methoxyethyl adenosine
  modified_base 17: mod_base = OTHER; note = 2'-O-methoxyethyl guanosine
  modified_base 18: mod_base = OTHER; note = 2'-O-methoxyethyl thymidine
  modified_base 19: mod_base = OTHER; note = 2'-O-methoxyethyl guanosine
  modified_base 20: mod_base = OTHER; note = 2'-O-methoxyethyl 5-methylcytidine
  misc_feature 1..3: note = RNA
  misc_feature 4: note = DNA
  misc_feature 5: note = RNA
  misc_feature 6..9: note = DNA
  misc_feature 10: note = RNA
  misc_feature 11..15: note = DNA
  misc_feature 16..20: note = RNA
gcagaggtgaagcgaagtgc

SEQ ID NO: 407 - DNA, 20 bp, synthetic construct
  source 1..20: mol_type = other DNA
  modified_base 1: mod_base = OTHER; note = Locked nucleic acid with guanine base
  modified_base 2: mod_base = OTHER; note = 2'-deoxy 5-methylcytidine
  modified_base 3: mod_base = OTHER; note = Locked nucleic acid with adenine base
  modified_base 5: mod_base = OTHER; note = 2'-O-methoxyethyl adenosine
  modified_base 10: mod_base = OTHER; note = 2'-O-methoxyethyl adenosine
  modified_base 13: mod_base = OTHER; note = 2'-deoxy 5-methylcytidine
  modified_base 16: mod_base = OTHER; note = 2'-O-methoxyethyl adenosine
  modified_base 17: mod_base = OTHER; note = 2'-O-methoxyethyl guanosine
  modified_base 18: mod_base = OTHER; note = 2'-O-methoxyethyl thymidine
  modified_base 19: mod_base = OTHER; note = 2'-O-methoxyethyl guanosine
  modified_base 20: mod_base = OTHER; note = 2'-O-methoxyethyl 5-methylcytidine
  misc_feature 1: note = RNA
  misc_feature 2: note = DNA
  misc_feature 3: note = RNA
  misc_feature 4: note = DNA
  misc_feature 5: note = RNA
  misc_feature 6..9: note = DNA
  misc_feature 10: note = RNA
  misc_feature 11..15: note = DNA
  misc_feature 16..20: note = RNA
gcagaggtgaagcgaagtgc

SEQ ID NO: 408 - DNA, 20 bp, synthetic construct
  source 1..20: mol_type = other DNA
  modified_base 1: mod_base = OTHER; note = Locked nucleic acid with guanine base
  modified_base 2: mod_base = OTHER; note = 2'-O-methoxyethyl 5-methylcytidine
  modified_base 3: mod_base = OTHER; note = Locked nucleic acid with adenine base
  modified_base 10: mod_base = OTHER; note = 2'-O-methoxyethyl adenosine
  modified_base 13: mod_base = OTHER; note = 2'-deoxy 5-methylcytidine
  modified_base 16: mod_base = OTHER; note = 2'-O-methoxyethyl adenosine
  modified_base 17: mod_base = OTHER; note = 2'-O-methoxyethyl guanosine
  modified_base 18: mod_base = OTHER; note = 2'-O-methoxyethyl thymidine
  modified_base 19: mod_base = OTHER; note = 2'-O-methoxyethyl guanosine
  modified_base 20: mod_base = OTHER; note = 2'-O-methoxyethyl 5-methylcytidine
  misc_feature 1..3: note = RNA
  misc_feature 4..9: note = DNA
  misc_feature 10: note = RNA
  misc_feature 11..15: note = DNA
  misc_feature 16..20: note = RNA
gcagaggtgaagcgaagtgc

SEQ ID NO: 409 - DNA, 20 bp, synthetic construct
  source 1..20: mol_type = other DNA
  modified_base 1: mod_base = OTHER; note = 2'-O-methoxyethyl guanosine
  modified_base 2: mod_base = OTHER; note = 2'-O-methoxyethyl 5-methylcytidine
  modified_base 3: mod_base = OTHER; note = 2'-O-methoxyethyl adenosine
  modified_base 4: mod_base = OTHER; note = 2'-O-methoxyethyl guanosine
  modified_base 5: mod_base = OTHER; note = 2'-O-methoxyethyl adenosine
  modified_base 10: mod_base = OTHER; note = 2'-O-methoxyethyl adenosine
  modified_base 13: mod_base = OTHER; note = 2'-deoxy 5-methylcytidine
  modified_base 15: mod_base = OTHER; note = 2'-O-methoxyethyl adenosine
  modified_base 16: mod_base = OTHER; note = 2'-O-methoxyethyl adenosine
  modified_base 17: mod_base = OTHER; note = 2'-O-methoxyethyl guanosine
  modified_base 18: mod_base = OTHER; note = 2'-O-methoxyethyl thymidine
  modified_base 19: mod_base = OTHER; note = 2'-O-methoxyethyl guanosine
  modified_base 20: mod_base = OTHER; note = 2'-O-methoxyethyl 5-methylcytidine
  misc_feature 1..5: note = RNA
  misc_feature 6..9: note = DNA
  misc_feature 10: note = RNA
  misc_feature 11..14: note = DNA
  misc_feature 15..20: note = RNA
gcagaggtgaagcgaagtgc

SEQ ID NO: 410 - DNA, 20 bp, synthetic construct
  source 1..20: mol_type = other DNA
  modified_base 1: mod_base = OTHER; note = 2'-O-methoxyethyl guanosine
  modified_base 2: mod_base = OTHER; note = 2'-O-methoxyethyl 5-methylcytidine
  modified_base 3: mod_base = OTHER; note = 2'-O-methoxyethyl adenosine
  modified_base 4: mod_base = OTHER; note = 2'-O-methoxyethyl guanosine
  modified_base 10: mod_base = OTHER; note = 2'-O-methoxyethyl adenosine
  modified_base 13: mod_base = OTHER; note = 2'-deoxy 5-methylcytidine
  modified_base 15: mod_base = OTHER; note = 2'-O-methoxyethyl adenosine
  modified_base 16: mod_base = OTHER; note = 2'-O-methoxyethyl adenosine
  modified_base 17: mod_base = OTHER; note = 2'-O-methoxyethyl guanosine
  modified_base 18: mod_base = OTHER; note = 2'-O-methoxyethyl thymidine
  modified_base 19: mod_base = OTHER; note = 2'-O-methoxyethyl guanosine
  modified_base 20: mod_base = OTHER; note = 2'-O-methoxyethyl 5-methylcytidine
  misc_feature 1..4: note = RNA
  misc_feature 5..9: note = DNA
  misc_feature 10: note = RNA
  misc_feature 11..14: note = DNA
  misc_feature 15..20: note = RNA
gcagaggtgaagcgaagtgc

SEQ ID NO: 411 - DNA, 20 bp, synthetic construct
  source 1..20: mol_type = other DNA
  modified_base 1: mod_base = OTHER; note = 2'-O-methoxyethyl guanosine
  modified_base 2: mod_base = OTHER; note = 2'-deoxy 5-methylcytidine
  modified_base 3: mod_base = OTHER; note = 2'-O-methoxyethyl adenosine
  modified_base 4: mod_base = OTHER; note = 2'-O-methoxyethyl guanosine
  modified_base 5: mod_base = OTHER; note = 2'-O-methoxyethyl adenosine
  modified_base 10: mod_base = OTHER; note = 2'-O-methoxyethyl adenosine
  modified_base 13: mod_base = OTHER; note = 2'-deoxy 5-methylcytidine
  modified_base 15: mod_base = OTHER; note = 2'-O-methoxyethyl adenosine
  modified_base 16: mod_base = OTHER; note = 2'-O-methoxyethyl adenosine
  modified_base 17: mod_base = OTHER; note = 2'-O-methoxyethyl guanosine
  modified_base 18: mod_base = OTHER; note = 2'-O-methoxyethyl thymidine
  modified_base 19: mod_base = OTHER; note = 2'-O-methoxyethyl guanosine
  modified_base 20: mod_base = OTHER; note = 2'-O-methoxyethyl 5-methylcytidine
  misc_feature 1: note = RNA
  misc_feature 2: note = DNA
  misc_feature 3..5: note = RNA
  misc_feature 6..9: note = DNA
  misc_feature 10: note = RNA
  misc_feature 11..14: note = DNA
  misc_feature 15..20: note = RNA
gcagaggtgaagcgaagtgc

SEQ ID NO: 412 - DNA, 20 bp, synthetic construct
  source 1..20: mol_type = other DNA
  modified_base 1: mod_base = OTHER; note = 2'-O-methoxyethyl guanosine
  modified_base 2: mod_base = OTHER; note = 2'-O-methoxyethyl 5-methylcytidine
  modified_base 3: mod_base = OTHER; note = 2'-O-methoxyethyl adenosine
  modified_base 5: mod_base = OTHER; note = 2'-O-methoxyethyl adenosine
  modified_base 10: mod_base = OTHER; note = 2'-O-methoxyethyl adenosine
  modified_base 13: mod_base = OTHER; note = 2'-deoxy 5-methylcytidine
  modified_base 15: mod_base = OTHER; note = 2'-O-methoxyethyl adenosine
  modified_base 16: mod_base = OTHER; note = 2'-O-methoxyethyl adenosine
  modified_base 17: mod_base = OTHER; note = 2'-O-methoxyethyl guanosine
  modified_base 18: mod_base = OTHER; note = 2'-O-methoxyethyl thymidine
  modified_base 19: mod_base = OTHER; note = 2'-O-methoxyethyl guanosine
  modified_base 20: mod_base = OTHER; note = 2'-O-methoxyethyl 5-methylcytidine
  misc_feature 1..3: note = RNA
  misc_feature 4: note = DNA
  misc_feature 5: note = RNA
  misc_feature 6..9: note = DNA
  misc_feature 10: note = RNA
  misc_feature 11..14: note = DNA
  misc_feature 15..20: note = RNA
gcagaggtgaagcgaagtgc

SEQ ID NO: 413 - DNA, 20 bp, synthetic construct
  source 1..20: mol_type = other DNA
  modified_base 1: mod_base = OTHER; note = 2'-O-methoxyethyl guanosine
  modified_base 2: mod_base = OTHER; note = 2'-O-methoxyethyl 5-methylcytidine
  modified_base 4: mod_base = OTHER; note = 2'-O-methoxyethyl guanosine
  modified_base 5: mod_base = OTHER; note = 2'-O-methoxyethyl adenosine
  modified_base 10: mod_base = OTHER; note = 2'-O-methoxyethyl adenosine
  modified_base 13: mod_base = OTHER; note = 2'-deoxy 5-methylcytidine
  modified_base 15: mod_base = OTHER; note = 2'-O-methoxyethyl adenosine
  modified_base 16: mod_base = OTHER; note = 2'-O-methoxyethyl adenosine
  modified_base 17: mod_base = OTHER; note = 2'-O-methoxyethyl guanosine
  modified_base 18: mod_base = OTHER; note = 2'-O-methoxyethyl thymidine
  modified_base 19: mod_base = OTHER; note = 2'-O-methoxyethyl guanosine
  modified_base 20: mod_base = OTHER; note = 2'-O-methoxyethyl 5-methylcytidine
  misc_feature 1..2: note = RNA
  misc_feature 3: note = DNA
  misc_feature 4..5: note = RNA
  misc_feature 6..9: note = DNA
  misc_feature 10: note = RNA
  misc_feature 11..14: note = DNA
  misc_feature 15..20: note = RNA
gcagaggtgaagcgaagtgc

SEQ ID NO: 414 - DNA, 20 bp, synthetic construct
  source 1..20: mol_type = other DNA
  modified_base 1: mod_base = OTHER; note = 2'-O-methoxyethyl guanosine
  modified_base 2: mod_base = OTHER; note = 2'-O-methoxyethyl 5-methylcytidine
  modified_base 3: mod_base = OTHER; note = 2'-O-methoxyethyl adenosine
  modified_base 4: mod_base = OTHER; note = 2'-O-methoxyethyl guanosine
  modified_base 5: mod_base = OTHER; note = 2'-O-methoxyethyl adenosine
  modified_base 10: mod_base = OTHER; note = 2'-O-methoxyethyl adenosine
  modified_base 13: mod_base = OTHER; note = 2'-deoxy 5-methylcytidine
  modified_base 16: mod_base = OTHER; note = 2'-O-methoxyethyl adenosine
  modified_base 17: mod_base = OTHER; note = 2'-O-methoxyethyl guanosine
  modified_base 18: mod_base = OTHER; note = 2'-O-methoxyethyl thymidine
  modified_base 19: mod_base = OTHER; note = 2'-O-methoxyethyl guanosine
  modified_base 20: mod_base = OTHER; note = 2'-O-methoxyethyl 5-methylcytidine
  misc_feature 1..5: note = RNA
  misc_feature 6..9: note = DNA
  misc_feature 10: note = RNA
  misc_feature 11..15: note = DNA
  misc_feature 16..20: note = RNA
gcagaggtgaagcgaagtgc

SEQ ID NO: 415 - DNA, 20 bp, synthetic construct
  source 1..20: mol_type = other DNA
  modified_base 1: mod_base = OTHER; note = 2'-O-methoxyethyl guanosine
  modified_base 2: mod_base = OTHER; note = 2'-deoxy 5-methylcytidine
  modified_base 3: mod_base = OTHER; note = 2'-O-methoxyethyl adenosine
  modified_base 4: mod_base = OTHER; note = 2'-O-methoxyethyl guanosine
  modified_base 5: mod_base = OTHER; note = 2'-O-methoxyethyl adenosine
  modified_base 10: mod_base = OTHER; note = 2'-O-methoxyethyl adenosine
  modified_base 13: mod_base = OTHER; note = 2'-deoxy 5-methylcytidine
  modified_base 16: mod_base = OTHER; note = 2'-O-methoxyethyl adenosine
  modified_base 17: mod_base = OTHER; note = 2'-O-methoxyethyl guanosine
  modified_base 18: mod_base = OTHER; note = 2'-O-methoxyethyl thymidine
  modified_base 19: mod_base = OTHER; note = 2'-O-methoxyethyl guanosine
  modified_base 20: mod_base = OTHER; note = 2'-O-methoxyethyl 5-methylcytidine
  misc_feature 1: note = RNA
  misc_feature 2: note = DNA
  misc_feature 3..5: note = RNA
  misc_feature 6..9: note = DNA
  misc_feature 10: note = RNA
  misc_feature 11..15: note = DNA
  misc_feature 16..20: note = RNA
gcagaggtgaagcgaagtgc

SEQ ID NO: 416 - DNA, 20 bp, synthetic construct
  source 1..20: mol_type = other DNA
  modified_base 1: mod_base = OTHER; note = 2'-O-methoxyethyl guanosine
  modified_base 2: mod_base = OTHER; note = 2'-O-methoxyethyl 5-methylcytidine
  modified_base 3: mod_base = OTHER; note = 2'-O-methoxyethyl adenosine
  modified_base 5: mod_base = OTHER; note = 2'-O-methoxyethyl adenosine
  modified_base 10: mod_base = OTHER; note = 2'-O-methoxyethyl adenosine
  modified_base 13: mod_base = OTHER; note = 2'-deoxy 5-methylcytidine
  modified_base 16: mod_base = OTHER; note = 2'-O-methoxyethyl adenosine
  modified_base 17: mod_base = OTHER; note = 2'-O-methoxyethyl guanosine
  modified_base 18: mod_base = OTHER; note = 2'-O-methoxyethyl thymidine
  modified_base 19: mod_base = OTHER; note = 2'-O-methoxyethyl guanosine
  modified_base 20: mod_base = OTHER; note = 2'-O-methoxyethyl 5-methylcytidine
  misc_feature 1..3: note = RNA
  misc_feature 4: note = DNA
  misc_feature 5: note = RNA
  misc_feature 6..9: note = DNA
  misc_feature 10: note = RNA
  misc_feature 11..15: note = DNA
  misc_feature 16..20: note = RNA
gcagaggtgaagcgaagtgc

SEQ ID NO: 417 - DNA, 20 bp, synthetic construct
  source 1..20: mol_type = other DNA
  modified_base 1: mod_base = OTHER; note = 2'-O-methoxyethyl guanosine
  modified_base 2: mod_base = OTHER; note = 2'-O-methoxyethyl 5-methylcytidine
  modified_base 3: mod_base = OTHER; note = 2'-O-methoxyethyl adenosine
  modified_base 4: mod_base = OTHER; note = 2'-O-methoxyethyl guanosine
  modified_base 5: mod_base = OTHER; note = 2'-O-methoxyethyl adenosine
  modified_base 10: mod_base = OTHER; note = 2'-O-methyl adenosine
  modified_base 13: mod_base = OTHER; note = 2'-deoxy 5-methylcytidine
  modified_base 15: mod_base = OTHER; note = 2'-O-methyl adenosine
  modified_base 16: mod_base = OTHER; note = 2'-O-methoxyethyl adenosine
  modified_base 17: mod_base = OTHER; note = 2'-O-methoxyethyl guanosine
  modified_base 18: mod_base = OTHER; note = 2'-O-methoxyethyl thymidine
  modified_base 19: mod_base = OTHER; note = 2'-O-methoxyethyl guanosine
  modified_base 20: mod_base = OTHER; note = 2'-O-methoxyethyl 5-methylcytidine
  misc_feature 1..5: note = RNA
  misc_feature 6..9: note = DNA
  misc_feature 10: note = RNA
  misc_feature 11..14: note = DNA
  misc_feature 15..20: note = RNA
gcagaggtgaagcgaagtgc

SEQ ID NO: 418 - DNA, 20 bp, synthetic construct
  source 1..20: mol_type = other DNA
  modified_base 1: mod_base = OTHER; note = 2'-O-methoxyethyl guanosine
  modified_base 2: mod_base = OTHER; note = 2'-O-methoxyethyl 5-methylcytidine
  modified_base 3: mod_base = OTHER; note = 2'-O-methoxyethyl adenosine
  modified_base 4: mod_base = OTHER; note = 2'-O-methoxyethyl guanosine
  modified_base 5: mod_base = OTHER; note = 2'-O-methoxyethyl adenosine
  modified_base 10: mod_base = OTHER; note = 2'-O-methoxyethyl adenosine
  modified_base 13: mod_base = OTHER; note = 2'-deoxy 5-methylcytidine
  modified_base 17: mod_base = OTHER; note = 2'-O-methoxyethyl guanosine
  modified_base 18: mod_base = OTHER; note = 2'-O-methoxyethyl thymidine
  modified_base 19: mod_base = OTHER; note = 2'-O-methoxyethyl guanosine
  modified_base 20: mod_base = OTHER; note = 2'-O-methoxyethyl 5-methylcytidine
  misc_feature 1..5: note = RNA
  misc_feature 6..9: note = DNA
  misc_feature 10: note = RNA
  misc_feature 11..16: note = DNA
  misc_feature 17..20: note = RNA
gcagaggtgaagcgaagtgc

SEQ ID NO: 419 - DNA, 20 bp, synthetic construct
  source 1..20: mol_type = other DNA
  modified_base 1: mod_base = OTHER; note = 2'-O-methoxyethyl guanosine
  modified_base 2: mod_base = OTHER; note = 2'-O-methoxyethyl 5-methylcytidine
  modified_base 3: mod_base = OTHER; note = 2'-O-methoxyethyl adenosine
  modified_base 4: mod_base = OTHER; note = 2'-O-methoxyethyl guanosine
  modified_base 10: mod_base = OTHER; note = 2'-O-methoxyethyl adenosine
  modified_base 13: mod_base = OTHER; note = 2'-deoxy 5-methylcytidine
  modified_base 17: mod_base = OTHER; note = 2'-O-methoxyethyl guanosine
  modified_base 18: mod_base = OTHER; note = 2'-O-methoxyethyl thymidine
  modified_base 19: mod_base = OTHER; note = 2'-O-methoxyethyl guanosine
  modified_base 20: mod_base = OTHER; note = 2'-O-methoxyethyl 5-methylcytidine
  misc_feature 1..4: note = RNA
  misc_feature 5..9: note = DNA
  misc_feature 10: note = RNA
  misc_feature 11..16: note = DNA
  misc_feature 17..20: note = RNA
gcagaggtgaagcgaagtgc

SEQ ID NO: 420 - DNA, 20 bp, synthetic construct
  source 1..20: mol_type = other DNA
  modified_base 1: mod_base = OTHER; note = 2'-O-methoxyethyl guanosine
  modified_base 2: mod_base = OTHER; note = 2'-O-methoxyethyl 5-methylcytidine
  modified_base 3: mod_base = OTHER; note = 2'-O-methoxyethyl adenosine
  modified_base 10: mod_base = OTHER; note = 2'-O-methoxyethyl adenosine
  modified_base 13: mod_base = OTHER; note = 2'-deoxy 5-methylcytidine
  modified_base 17: mod_base = OTHER; note = 2'-O-methoxyethyl guanosine
  modified_base 18: mod_base = OTHER; note = 2'-O-methoxyethyl thymidine
  modified_base 19: mod_base = OTHER; note = 2'-O-methoxyethyl guanosine
  modified_base 20: mod_base = OTHER; note = 2'-O-methoxyethyl 5-methylcytidine
  misc_feature 1..3: note = RNA
  misc_feature 4..9: note = DNA
  misc_feature 10: note = RNA
  misc_feature 11..16: note = DNA
  misc_feature 17..20: note = RNA
gcagaggtgaagcgaagtgc

SEQ ID NO: 421 - DNA, 20 bp, synthetic construct
  source 1..20: mol_type = other DNA
  modified_base 1: mod_base = OTHER; note = 2'-O-methoxyethyl guanosine
  modified_base 2: mod_base = OTHER; note = 2'-O-methoxyethyl 5-methylcytidine
  modified_base 3: mod_base = OTHER; note = 2'-O-methoxyethyl adenosine
  modified_base 4: mod_base = OTHER; note = 2'-O-methoxyethyl guanosine
  modified_base 5: mod_base = OTHER; note = 2'-O-methoxyethyl adenosine
  modified_base 10: mod_base = OTHER; note = 2'-O-methoxyethyl adenosine
  modified_base 13: mod_base = OTHER; note = 2'-deoxy 5-methylcytidine
  modified_base 16: mod_base = OTHER; note = Locked nucleic acid with adenine base
  modified_base 17: mod_base = OTHER; note = 2'-O-methoxyethyl guanosine
  modified_base 18: mod_base = OTHER; note = 2'-O-methoxyethyl thymidine
  modified_base 19: mod_base = OTHER; note = 2'-O-methoxyethyl guanosine
  modified_base 20: mod_base = OTHER; note = Locked nucleic acid with 5-methylcytidine base
  misc_feature 1..5: note = RNA
  misc_feature 6..9: note = DNA
  misc_feature 10: note = RNA
  misc_feature 11..15: note = DNA
  misc_feature 16..20: note = RNA
gcagaggtgaagcgaagtgc

SEQ ID NO: 422 - DNA, 20 bp, synthetic construct
  source 1..20: mol_type = other DNA
  modified_base 1: mod_base = OTHER; note = 2'-O-methoxyethyl guanosine
  modified_base 2: mod_base = OTHER; note = 2'-O-methoxyethyl 5-methylcytidine
  modified_base 3: mod_base = OTHER; note = 2'-O-methoxyethyl adenosine
  modified_base 4: mod_base = OTHER; note = 2'-O-methoxyethyl guanosine
  modified_base 5: mod_base = OTHER; note = 2'-O-methoxyethyl adenosine
  modified_base 10: mod_base = OTHER; note = 2'-O-methoxyethyl adenosine
  modified_base 13: mod_base = OTHER; note = 2'-deoxy 5-methylcytidine
  modified_base 16: mod_base = OTHER; note = Locked nucleic acid with adenine base
  modified_base 17: mod_base = OTHER; note = 2'-O-methoxyethyl guanosine
  modified_base 18: mod_base = OTHER; note = 2'-O-methoxyethyl thymidine
  modified_base 19: mod_base = OTHER; note = Locked nucleic acid with guanine base
  modified_base 20: mod_base = OTHER; note = 2'-O-methoxyethyl 5-methylcytidine
  misc_feature 1..5: note = RNA
  misc_feature 6..9: note = DNA
  misc_feature 10: note = RNA
  misc_feature 11..15: note = DNA
  misc_feature 16..20: note = RNA
gcagaggtgaagcgaagtgc

SEQ ID NO: 423 - DNA, 20 bp, synthetic construct
  source 1..20: mol_type = other DNA
  modified_base 1: mod_base = OTHER; note = 2'-O-methoxyethyl guanosine
  modified_base 2: mod_base = OTHER; note = 2'-O-methoxyethyl 5-methylcytidine
  modified_base 3: mod_base = OTHER; note = 2'-O-methoxyethyl adenosine
  modified_base 4: mod_base = OTHER; note = 2'-O-methoxyethyl guanosine
  modified_base 5: mod_base = OTHER; note = 2'-O-methoxyethyl adenosine
  modified_base 10: mod_base = OTHER; note = 2'-O-methoxyethyl adenosine
  modified_base 13: mod_base = OTHER; note = 2'-deoxy 5-methylcytidine
  modified_base 16: mod_base = OTHER; note = Locked nucleic acid with adenine base
  modified_base 17: mod_base = OTHER; note = 2'-O-methoxyethyl guanosine
  modified_base 18: mod_base = OTHER; note = Locked nucleic acid with thymine base
  modified_base 19: mod_base = OTHER; note = 2'-O-methoxyethyl guanosine
  modified_base 20: mod_base = OTHER; note = 2'-O-methoxyethyl 5-methylcytidine
  misc_feature 1..5: note = RNA
  misc_feature 6..9: note = DNA
  misc_feature 10: note = RNA
  misc_feature 11..15: note = DNA
  misc_feature 16..20: note = RNA
gcagaggtgaagcgaagtgc

SEQ ID NO: 424 - DNA, 20 bp, synthetic construct
  source 1..20: mol_type = other DNA
  modified_base 1: mod_base = OTHER; note = 2'-O-methoxyethyl guanosine
  modified_base 2: mod_base = OTHER; note = 2'-O-methoxyethyl 5-methylcytidine
  modified_base 3: mod_base = OTHER; note = 2'-O-methoxyethyl adenosine
  modified_base 4: mod_base = OTHER; note = 2'-O-methoxyethyl guanosine
  modified_base 5: mod_base = OTHER; note = 2'-O-methoxyethyl adenosine
  modified_base 10: mod_base = OTHER; note = 2'-O-methoxyethyl adenosine
  modified_base 13: mod_base = OTHER; note = 2'-deoxy 5-methylcytidine
  modified_base 16: mod_base = OTHER; note = 2'-O-methoxyethyl adenosine
  modified_base 17: mod_base = OTHER; note = Locked nucleic acid with guanine base
  modified_base 18: mod_base = OTHER; note = Locked nucleic acid with thymine base
  modified_base 19: mod_base = OTHER; note = 2'-O-methoxyethyl guanosine
  modified_base 20: mod_base = OTHER; note = 2'-O-methoxyethyl 5-methylcytidine
  misc_feature 1..5: note = RNA
  misc_feature 6..9: note = DNA
  misc_feature 10: note = RNA
  misc_feature 11..15: note = DNA
  misc_feature 16..20: note = RNA
gcagaggtgaagcgaagtgc

SEQ ID NO: 425 - DNA, 20 bp, synthetic construct
  source 1..20: mol_type = other DNA
  modified_base 1: mod_base = OTHER; note = 2'-O-methoxyethyl guanosine
  modified_base 2: mod_base = OTHER; note = 2'-deoxy 5-methylcytidine
  modified_base 3: mod_base = OTHER; note = 2'-O-methoxyethyl adenosine
  modified_base 4: mod_base = OTHER; note = 2'-O-methoxyethyl guanosine
  modified_base 5: mod_base = OTHER; note = 2'-O-methoxyethyl adenosine
  modified_base 10: mod_base = OTHER; note = 2'-O-methoxyethyl adenosine
  modified_base 13: mod_base = OTHER; note = 2'-deoxy 5-methylcytidine
  modified_base 16: mod_base = OTHER; note = 2'-O-methoxyethyl adenosine
  modified_base 17: mod_base = OTHER; note = Locked nucleic acid with guanine base
  modified_base 18: mod_base = OTHER; note = Locked nucleic acid with thymine base
  modified_base 19: mod_base = OTHER; note = 2'-O-methoxyethyl guanosine
  modified_base 20: mod_base = OTHER; note = 2'-O-methoxyethyl 5-methylcytidine
  misc_feature 1: note = RNA
  misc_feature 2: note = DNA
  misc_feature 3..5: note = RNA
  misc_feature 6..9: note = DNA
  misc_feature 10: note = RNA
  misc_feature 11..15: note = DNA
  misc_feature 16..20: note = RNA
gcagaggtgaagcgaagtgc

SEQ ID NO: 426 - DNA, 20 bp, synthetic construct
  source 1..20: mol_type = other DNA
  modified_base 1: mod_base = OTHER; note = 2'-O-methoxyethyl guanosine
  modified_base 2: mod_base = OTHER; note = 2'-O-methoxyethyl 5-methylcytidine
  modified_base 3: mod_base = OTHER; note = 2'-O-methoxyethyl adenosine
  modified_base 4: mod_base = OTHER; note = 2'-O-methoxyethyl guanosine
  modified_base 10: mod_base = OTHER; note = 2'-O-methoxyethyl adenosine
  modified_base 13: mod_base = OTHER; note = 2'-deoxy 5-methylcytidine
  modified_base 16: mod_base = OTHER; note = 2'-O-methoxyethyl adenosine
  modified_base 17: mod_base = OTHER; note = Locked nucleic acid with guanine base
  modified_base 18: mod_base = OTHER; note = Locked nucleic acid with thymine base
  modified_base 19: mod_base = OTHER; note = 2'-O-methoxyethyl guanosine
  modified_base 20: mod_base = OTHER; note = 2'-O-methoxyethyl 5-methylcytidine
  misc_feature 1..4: note = RNA
  misc_feature 5..9: note = DNA
  misc_feature 10: note = RNA
  misc_feature 11..15: note = DNA
  misc_feature 16..20: note = RNA
gcagaggtgaagcgaagtgc

SEQ ID NO: 427 - DNA, 20 bp, synthetic construct
  source 1..20: mol_type = other DNA
  modified_base 1: mod_base = OTHER; note = 2'-O-methoxyethyl guanosine
  modified_base 2: mod_base = OTHER; note = 2'-deoxy 5-methylcytidine
  modified_base 3: mod_base = OTHER; note = 2'-O-methoxyethyl adenosine
  modified_base 4: mod_base = OTHER; note = 2'-O-methoxyethyl guanosine
  modified_base 10: mod_base = OTHER; note = 2'-O-methoxyethyl adenosine
  modified_base 13: mod_base = OTHER; note = 2'-deoxy 5-methylcytidine
  modified_base 16: mod_base = OTHER; note = 2'-O-methoxyethyl adenosine
  modified_base 17: mod_base = OTHER; note = Locked nucleic acid with guanine base
  modified_base 18: mod_base = OTHER; note = Locked nucleic acid with thymine base
  modified_base 19: mod_base = OTHER; note = 2'-O-methoxyethyl guanosine
  modified_base 20: mod_base = OTHER; note = 2'-O-methoxyethyl 5-methylcytidine
  misc_feature 1: note = RNA
  misc_feature 2: note = DNA
  misc_feature 3..4: note = RNA
  misc_feature 5..9: note = DNA
  misc_feature 10: note = RNA
  misc_feature 11..15: note = DNA
  misc_feature 16..20: note = RNA
gcagaggtgaagcgaagtgc

SEQ ID NO: 428 - DNA, 20 bp, synthetic construct
  source 1..20: mol_type = other DNA
  modified_base 1: mod_base = OTHER; note = 2'-O-methoxyethyl guanosine
  modified_base 2: mod_base = OTHER; note = 2'-deoxy 5-methylcytidine
  modified_base 3: mod_base = OTHER; note = 2'-O-methoxyethyl adenosine
  modified_base 4: mod_base = OTHER; note = 2'-O-methoxyethyl guanosine
  modified_base 5: mod_base = OTHER; note = 2'-O-methoxyethyl adenosine
  modified_base 10: mod_base = OTHER; note = 2'-O-methoxyethyl adenosine
  modified_base 13: mod_base = OTHER; note = 2'-deoxy 5-methylcytidine
  modified_base 16: mod_base = OTHER; note = 2'-O-methoxyethyl adenosine
  modified_base 17: mod_base = OTHER; note = Locked nucleic acid with guanine base
  modified_base 18: mod_base = OTHER; note = 2'-O-methoxyethyl thymidine
  modified_base 19: mod_base = OTHER; note = 2'-O-methoxyethyl guanosine
  modified_base 20: mod_base = OTHER; note = Locked nucleic acid with 5-methylcytidine base
  misc_feature 1: note = RNA
  misc_feature 2: note = DNA
  misc_feature 3..5: note = RNA
  misc_feature 6..9: note = DNA
  misc_feature 10: note = RNA
  misc_feature 11..15: note = DNA
  misc_feature 16..20: note = RNA
gcagaggtgaagcgaagtgc

SEQ ID NO: 429 - DNA, 20 bp, synthetic construct
  source 1..20: mol_type = other DNA
  modified_base 1: mod_base = OTHER; note = 2'-O-methoxyethyl guanosine
  modified_base 2: mod_base = OTHER; note = 2'-O-methoxyethyl 5-methylcytidine
  modified_base 3: mod_base = OTHER; note = 2'-O-methoxyethyl adenosine
  modified_base 4: mod_base = OTHER; note = 2'-O-methoxyethyl guanosine
  modified_base 10: mod_base = OTHER; note = 2'-O-methoxyethyl adenosine
  modified_base 13: mod_base = OTHER; note = 2'-deoxy 5-methylcytidine
  modified_base 16: mod_base = OTHER; note = 2'-O-methoxyethyl adenosine
  modified_base 17: mod_base = OTHER; note = Locked nucleic acid with guanine base
  modified_base 18: mod_base = OTHER; note = 2'-O-methoxyethyl thymidine
  modified_base 19: mod_base = OTHER; note = 2'-O-methoxyethyl guanosine
  modified_base 20: mod_base = OTHER; note = Locked nucleic acid with 5-methylcytidine base
  misc_feature 1..4: note = RNA
  misc_feature 5..9: note = DNA
  misc_feature 10: note = RNA
  misc_feature 11..15: note = DNA
  misc_feature 16..20: note = RNA
gcagaggtgaagcgaagtgc

SEQ ID NO: 430 - DNA, 20 bp, synthetic construct
  source 1..20: mol_type = other DNA
  modified_base 1: mod_base = OTHER; note = 2'-O-methoxyethyl guanosine
  modified_base 2: mod_base = OTHER; note = 2'-deoxy 5-methylcytidine
  modified_base 3: mod_base = OTHER; note = 2'-O-methoxyethyl adenosine
  modified_base 4: mod_base = OTHER; note = 2'-O-methoxyethyl guanosine
  modified_base 10: mod_base = OTHER; note = 2'-O-methoxyethyl adenosine
  modified_base 13: mod_base = OTHER; note = 2'-deoxy 5-methylcytidine
  modified_base 16: mod_base = OTHER; note = 2'-O-methoxyethyl adenosine
  modified_base 17: mod_base = OTHER; note = Locked nucleic acid with guanine base
  modified_base 18: mod_base = OTHER; note = 2'-O-methoxyethyl thymidine
  modified_base 19: mod_base = OTHER; note = 2'-O-methoxyethyl guanosine
  modified_base 20: mod_base = OTHER; note = Locked nucleic acid with 5-methylcytidine base
  misc_feature 1: note = RNA
  misc_feature 2: note = DNA
  misc_feature 3..4: note = RNA
  misc_feature 5..9: note = DNA
  misc_feature 10: note = RNA
  misc_feature 11..15: note = DNA
  misc_feature 16..20: note = RNA
gcagaggtgaagcgaagtgc

SEQ ID NO: 431 - DNA, 20 bp, synthetic construct
  source 1..20: mol_type = other DNA
  modified_base 1: mod_base = OTHER; note = 2'-O-methoxyethyl guanosine
  modified_base 2: mod_base = OTHER; note = 2'-O-methoxyethyl 5-methylcytidine
  modified_base 3: mod_base = OTHER; note = 2'-O-methoxyethyl adenosine
  modified_base 4: mod_base = OTHER; note = 2'-O-methoxyethyl guanosine
  modified_base 10: mod_base = OTHER; note = 2'-O-methoxyethyl adenosine
  modified_base 13: mod_base = OTHER; note = 2'-deoxy 5-methylcytidine
  modified_base 16: mod_base = OTHER; note = 2'-O-methoxyethyl adenosine
  modified_base 17: mod_base = OTHER; note = Locked nucleic acid with guanine base
  modified_base 18: mod_base = OTHER; note = 2'-O-methoxyethyl thymidine
  modified_base 19: mod_base = OTHER; note = Locked nucleic acid with guanine base
  modified_base 20: mod_base = OTHER; note = 2'-O-methoxyethyl 5-methylcytidine
  misc_feature 1..4: note = RNA
  misc_feature 5..9: note = DNA
  misc_feature 10: note = RNA
  misc_feature 11..15: note = DNA
  misc_feature 16..20: note = RNA
gcagaggtgaagcgaagtgc

SEQ ID NO: 432 - DNA, 20 bp, synthetic construct
  source 1..20: mol_type = other DNA
  modified_base 1: mod_base = OTHER; note = 2'-O-methoxyethyl guanosine
  modified_base 2: mod_base = OTHER; note = 2'-deoxy 5-methylcytidine
  modified_base 3: mod_base = OTHER; note = 2'-O-methoxyethyl adenosine
  modified_base 4: mod_base = OTHER; note = 2'-O-methoxyethyl guanosine
  modified_base 5: mod_base = OTHER; note = 2'-O-methoxyethyl adenosine
  modified_base 10: mod_base = OTHER; note = 2'-O-methoxyethyl adenosine
  modified_base 13: mod_base = OTHER; note = 2'-deoxy 5-methylcytidine
  modified_base 16: mod_base = OTHER; note = 2'-O-methoxyethyl adenosine
  modified_base 17: mod_base = OTHER; note = Locked nucleic acid with guanine base
  modified_base 18: mod_base = OTHER; note = Locked nucleic acid with thymine base
  modified_base 19: mod_base = OTHER; note = Locked nucleic acid with guanine base
  modified_base 20: mod_base = OTHER; note = 2'-O-methoxyethyl 5-methylcytidine
  misc_feature 1: note = RNA
  misc_feature 2: note = DNA
  misc_feature 3..5: note = RNA
  misc_feature 6..9: note = DNA
  misc_feature 10: note = RNA
  misc_feature 11..15: note = DNA
  misc_feature 16..20: note = RNA
gcagaggtgaagcgaagtgc

SEQ ID NO: 433 - DNA, 20 bp, synthetic construct
  source 1..20: mol_type = other DNA
  modified_base 1: mod_base = OTHER; note = 2'-O-methoxyethyl guanosine
  modified_base 2: mod_base = OTHER; note = 2'-O-methoxyethyl 5-methylcytidine
  modified_base 3: mod_base = OTHER; note = 2'-O-methoxyethyl adenosine
  modified_base 4: mod_base = OTHER; note = 2'-O-methoxyethyl guanosine
  modified_base 10: mod_base = OTHER; note = 2'-O-methoxyethyl adenosine
  modified_base 13: mod_base = OTHER; note = 2'-deoxy 5-methylcytidine
  modified_base 16: mod_base = OTHER; note = 2'-O-methoxyethyl adenosine
  modified_base 17: mod_base = OTHER; note = Locked nucleic acid with guanine base
  modified_base 18: mod_base = OTHER; note = Locked nucleic acid with thymine base
  modified_base 19: mod_base = OTHER; note = Locked nucleic acid with guanine base
  modified_base 20: mod_base = OTHER; note = 2'-O-methoxyethyl 5-methylcytidine
  misc_feature 1..4: note = RNA
  misc_feature 5..9: note = DNA
  misc_feature 10: note = RNA
  misc_feature 11..15: note = DNA
  misc_feature 16..20: note = RNA
gcagaggtgaagcgaagtgc

SEQ ID NO: 434 - DNA, 20 bp, synthetic construct
  source 1..20: mol_type = other DNA
  modified_base 1: mod_base = OTHER; note = 2'-O-methoxyethyl guanosine
  modified_base 2: mod_base = OTHER; note = 2'-deoxy 5-methylcytidine
  modified_base 3: mod_base = OTHER; note = 2'-O-methoxyethyl adenosine
  modified_base 4: mod_base = OTHER; note = 2'-O-methoxyethyl guanosine
  modified_base 10: mod_base = OTHER; note = 2'-O-methoxyethyl adenosine
  modified_base 13: mod_base = OTHER; note = 2'-deoxy 5-methylcytidine
  modified_base 16: mod_base = OTHER; note = 2'-O-methoxyethyl adenosine
  modified_base 17: mod_base = OTHER; note = Locked nucleic acid with guanine base
  modified_base 18: mod_base = OTHER; note = Locked nucleic acid with thymine base
  modified_base 19: mod_base = OTHER; note = Locked nucleic acid with guanine base
  modified_base 20: mod_base = OTHER; note = 2'-O-methoxyethyl 5-methylcytidine
  misc_feature 1: note = RNA
  misc_feature 2: note = DNA
  misc_feature 3..4: note = RNA
  misc_feature 5..9: note = DNA
  misc_feature 10: note = RNA
  misc_feature 11..15: note = DNA
  misc_feature 16..20: note = RNA
gcagaggtgaagcgaagtgc

SEQ ID NO: 435 - DNA, 20 bp, synthetic construct
  source 1..20: mol_type = other DNA
  modified_base 1: mod_base = OTHER; note = 2'-O-methoxyethyl guanosine
  modified_base 2: mod_base = OTHER; note = 2'-O-methoxyethyl 5-methylcytidine
  modified_base 3: mod_base = OTHER; note = 2'-O-methoxyethyl adenosine
  modified_base 5: mod_base = OTHER; note = 2'-O-methoxyethyl adenosine
  modified_base 10: mod_base = OTHER; note = 2'-O-methoxyethyl adenosine
  modified_base 13: mod_base = OTHER; note = 2'-deoxy 5-methylcytidine
  modified_base 16: mod_base = OTHER; note = 2'-O-methoxyethyl adenosine
  modified_base 17: mod_base = OTHER; note = Locked nucleic acid with guanine base
  modified_base 18: mod_base = OTHER; note = Locked nucleic acid with thymine base
  modified_base 19: mod_base = OTHER; note = 2'-O-methoxyethyl guanosine
  modified_base 20: mod_base = OTHER; note = 2'-O-methoxyethyl 5-methylcytidine
  misc_feature 1..3: note = RNA
  misc_feature 4: note = DNA
  misc_feature 5: note = RNA
  misc_feature 6..9: note = DNA
  misc_feature 10: note = RNA
  misc_feature 11..15: note = DNA
  misc_feature 16..20: note = RNA
gcagaggtgaagcgaagtgc

SEQ ID NO: 436 - DNA, 20 bp, synthetic construct
  source 1..20: mol_type = other DNA
  modified_base 1: mod_base = OTHER; note = 2'-O-methoxyethyl guanosine
  modified_base 2: mod_base = OTHER; note = 2'-O-methoxyethyl 5-methylcytidine
  modified_base 4: mod_base = OTHER; note = 2'-O-methoxyethyl guanosine
  modified_base 5: mod_base = OTHER; note = 2'-O-methoxyethyl adenosine
  modified_base 10: mod_base = OTHER; note = 2'-O-methoxyethyl adenosine
  modified_base 13: mod_base = OTHER; note = 2'-deoxy 5-methylcytidine
  modified_base 16: mod_base = OTHER; note = 2'-O-methoxyethyl adenosine
  modified_base 17: mod_base = OTHER; note = Locked nucleic acid with guanine base
  modified_base 18: mod_base = OTHER; note = Locked nucleic acid with thymine base
  modified_base 19: mod_base = OTHER; note = 2'-O-methoxyethyl guanosine
  modified_base 20: mod_base = OTHER; note = 2'-O-methoxyethyl 5-methylcytidine
  misc_feature 1..2: note = RNA
  misc_feature 3: note = DNA
  misc_feature 4..5: note = RNA
  misc_feature 6..9: note = DNA
  misc_feature 10: note = RNA
  misc_feature 11..15: note = DNA
  misc_feature 16..20: note = RNA
gcagaggtgaagcgaagtgc

SEQ ID NO: 437 - DNA, 20 bp, synthetic construct
  source 1..20: mol_type = other DNA
  modified_base 1: mod_base = OTHER; note = 2'-O-methoxyethyl guanosine
  modified_base 2: mod_base = OTHER; note = 2'-deoxy 5-methylcytidine
  modified_base 3: mod_base = OTHER; note = 2'-O-methoxyethyl adenosine
  modified_base 5: mod_base = OTHER; note = 2'-O-methoxyethyl adenosine
  modified_base 10: mod_base = OTHER; note = 2'-O-methoxyethyl adenosine
  modified_base 13: mod_base = OTHER; note = 2'-deoxy 5-methylcytidine
  modified_base 16: mod_base = OTHER; note = 2'-O-methoxyethyl adenosine
  modified_base 17: mod_base = OTHER; note = Locked nucleic acid with guanine base
  modified_base 18: mod_base = OTHER; note = Locked nucleic acid with thymine base
  modified_base 19: mod_base = OTHER; note = 2'-O-methoxyethyl guanosine
  modified_base 20: mod_base = OTHER; note = 2'-O-methoxyethyl 5-methylcytidine
  misc_feature 1: note = RNA
  misc_feature 2: note = DNA
  misc_feature 3: note = RNA
  misc_feature 4: note = DNA
  misc_feature 5: note = RNA
  misc_feature 6..9: note = DNA
  misc_feature 10: note = RNA
  misc_feature 11..15: note = DNA
  misc_feature 16..20: note = RNA
gcagaggtgaagcgaagtgc

SEQ ID NO: 438 - DNA, 20 bp, synthetic construct
  source 1..20: mol_type = other DNA
  modified_base 1: mod_base = OTHER; note = 2'-O-methoxyethyl guanosine
  modified_base 2: mod_base = OTHER; note = 2'-deoxy 5-methylcytidine
  modified_base 3: mod_base = OTHER; note = 2'-O-methoxyethyl adenosine
  modified_base 4: mod_base = OTHER; note = 2'-O-methoxyethyl guanosine
  modified_base 5: mod_base = OTHER; note = 2'-O-methoxyethyl adenosine
  modified_base 10: mod_base = OTHER; note = 2'-O-methoxyethyl adenosine
  modified_base 13: mod_base = OTHER; note = 2'-deoxy 5-methylcytidine
  modified_base 16: mod_base = OTHER; note = 2'-O-methoxyethyl adenosine
  modified_base 17: mod_base = OTHER; note = Locked nucleic acid with guanine base
  modified_base 18: mod_base = OTHER; note = 2'-O-methoxyethyl thymidine
  modified_base 19: mod_base = OTHER; note = Locked nucleic acid with guanine base
  modified_base 20: mod_base = OTHER; note = Locked nucleic acid with 5-methylcytidine base
  misc_feature 1: note = RNA
  misc_feature 2: note = DNA
  misc_feature 3..5: note = RNA
  misc_feature 6..9: note = DNA
  misc_feature 10: note = RNA
  misc_feature 11..15: note = DNA
  misc_feature 16..20: note = RNA
gcagaggtgaagcgaagtgc

SEQ ID NO: 439 - DNA, 20 bp, synthetic construct
  source 1..20: mol_type = other DNA
  modified_base 1: mod_base = OTHER; note = 2'-O-methoxyethyl guanosine
  modified_base 2: mod_base = OTHER; note = 2'-O-methoxyethyl 5-methylcytidine
  modified_base 3: mod_base = OTHER; note = 2'-O-methoxyethyl adenosine
  modified_base 4: mod_base = OTHER; note = 2'-O-methoxyethyl guanosine
  modified_base 10: mod_base = OTHER; note = 2'-O-methoxyethyl adenosine
  modified_base 13: mod_base = OTHER; note = 2'-deoxy 5-methylcytidine
  modified_base 16: mod_base = OTHER; note = 2'-O-methoxyethyl adenosine
  modified_base 17: mod_base = OTHER; note = Locked nucleic acid with guanine base
  modified_base 18: mod_base = OTHER; note = 2'-O-methoxyethyl thymidine
  modified_base 19: mod_base = OTHER; note = Locked nucleic acid with guanine base
  modified_base 20: mod_base = OTHER; note = Locked nucleic acid with 5-methylcytidine base
  misc_feature 1..4: note = RNA
  misc_feature 5..9: note = DNA
  misc_feature 10: note = RNA
  misc_feature 11..15: note = DNA
  misc_feature 16..20: note = RNA
gcagaggtgaagcgaagtgc

SEQ ID NO: 440 - DNA, 20 bp, synthetic construct
  source 1..20: mol_type = other DNA
  modified_base 1: mod_base = OTHER; note = 2'-O-methoxyethyl guanosine
  modified_base 2: mod_base = OTHER; note = 2'-deoxy 5-methylcytidine
  modified_base 3: mod_base = OTHER; note = 2'-O-methoxyethyl adenosine
  modified_base 4: mod_base = OTHER; note = 2'-O-methoxyethyl guanosine
  modified_base 10: mod_base = OTHER; note = 2'-O-methoxyethyl adenosine
  modified_base 13: mod_base = OTHER; note = 2'-deoxy 5-methylcytidine
  modified_base 16: mod_base = OTHER; note = 2'-O-methoxyethyl adenosine
  modified_base 17: mod_base = OTHER; note = Locked nucleic acid with guanine base
  modified_base 18: mod_base = OTHER; note = 2'-O-methoxyethyl thymidine
  modified_base 19: mod_base = OTHER; note = Locked nucleic acid with guanine base
  modified_base 20: mod_base = OTHER; note = Locked nucleic acid with 5-methylcytidine base
  misc_feature 1: note = RNA
  misc_feature 2: note = DNA
  misc_feature 3..4: note = RNA
  misc_feature 5..9: note = DNA
  misc_feature 10: note = RNA
  misc_feature 11..15: note = DNA
  misc_feature 16..20: note = RNA
gcagaggtgaagcgaagtgc

SEQ ID NO: 441 - DNA, 20 bp, synthetic construct
  source 1..20: mol_type = other DNA
  modified_base 1: mod_base = OTHER; note = 2'-O-methoxyethyl guanosine
  modified_base 2: mod_base = OTHER; note = 2'-deoxy 5-methylcytidine
  modified_base 4: mod_base = OTHER; note = 2'-O-methoxyethyl guanosine
  modified_base 5: mod_base = OTHER; note = 2'-O-methoxyethyl adenosine
  modified_base 10: mod_base = OTHER; note = 2'-O-methoxyethyl adenosine
  modified_base 13: mod_base = OTHER; note = 2'-deoxy 5-methylcytidine
  modified_base 16: mod_base = OTHER; note = 2'-O-methoxyethyl adenosine
  modified_base 17: mod_base = OTHER; note = Locked nucleic acid with guanine base
  modified_base 18: mod_base = OTHER; note = Locked nucleic acid with thymine base
  modified_base 19: mod_base = OTHER; note = 2'-O-methoxyethyl guanosine
  modified_base 20: mod_base = OTHER; note = 2'-O-methoxyethyl 5-methylcytidine
  misc_feature 1: note = RNA
  misc_feature 2..3: note = DNA
  misc_feature 4..5: note = RNA
  misc_feature 6..9: note = DNA
  misc_feature 10: note = RNA
  misc_feature 11..15: note = DNA
  misc_feature 16..20: note = RNA
gcagaggtgaagcgaagtgc

SEQ ID NO: 442 - DNA, 20 bp, synthetic construct
  source 1..20: mol_type = other DNA
  modified_base 1: mod_base = OTHER; note = 2'-O-methoxyethyl guanosine
  modified_base 2: mod_base = OTHER; note = 2'-O-methoxyethyl 5-methylcytidine
  modified_base 5: mod_base = OTHER; note = 2'-O-methoxyethyl adenosine
  modified_base 10: mod_base = OTHER; note = 2'-O-methoxyethyl adenosine
  modified_base 13: mod_base = OTHER; note = 2'-deoxy 5-methylcytidine
  modified_base 16: mod_base = OTHER; note = 2'-O-methoxyethyl adenosine
  modified_base 17: mod_base = OTHER; note = Locked nucleic acid with guanine base
  modified_base 18: mod_base = OTHER; note = Locked nucleic acid with thymine base
  modified_base 19: mod_base = OTHER; note = 2'-O-methoxyethyl guanosine
  modified_base 20: mod_base = OTHER; note = 2'-O-methoxyethyl 5-methylcytidine
  misc_feature 1..2: note = RNA
  misc_feature 3..4: note = DNA
  misc_feature 5: note = RNA
  misc_feature 6..9: note = DNA
  misc_feature 10: note = RNA
  misc_feature 11..15: note = DNA
  misc_feature 16..20: note = RNA
gcagaggtgaagcgaagtgc

SEQ ID NO: 443 - DNA, 20 bp, synthetic construct
  source 1..20: mol_type = other DNA
  modified_base 1: mod_base = OTHER; note = 2'-O-methoxyethyl guanosine
  modified_base 2: mod_base = OTHER; note = 2'-O-methoxyethyl 5-methylcytidine
  modified_base 3: mod_base = OTHER; note = 2'-O-methoxyethyl adenosine
  modified_base 4: mod_base = OTHER; note = 2'-O-methoxyethyl guanosine
  modified_base 5: mod_base = OTHER; note = 2'-O-methoxyethyl adenosine
  modified_base 13: mod_base = OTHER; note = 2'-deoxy 5-methylcytidine
  modified_base 16: mod_base = OTHER; note = 2'-O-methoxyethyl adenosine
  modified_base 17: mod_base = OTHER; note = Locked nucleic acid with guanine base
  modified_base 18: mod_base = OTHER; note = Locked nucleic acid with thymine base
  modified_base 19: mod_base = OTHER; note = 2'-O-methoxyethyl guanosine
  modified_base 20: mod_base = OTHER; note = 2'-O-methoxyethyl 5-methylcytidine
  misc_feature 1..5: note = RNA
  misc_feature 6..15: note = DNA
  misc_feature 16..20: note = RNA
gcagaggtgaagcgaagtgc

SEQ ID NO: 444 - DNA, 20 bp, synthetic construct
  source 1..20: mol_type = other DNA
  modified_base 1: mod_base = OTHER; note = 2'-O-methoxyethyl guanosine
  modified_base 2: mod_base = OTHER; note = 2'-deoxy 5-methylcytidine
  modified_base 3: mod_base = OTHER; note = 2'-O-methoxyethyl adenosine
  modified_base 4: mod_base = OTHER; note = 2'-O-methoxyethyl guanosine
  modified_base 5: mod_base = OTHER; note = 2'-O-methoxyethyl adenosine
  modified_base 13: mod_base = OTHER; note = 2'-deoxy 5-methylcytidine
  modified_base 16: mod_base = OTHER; note = 2'-O-methoxyethyl adenosine
  modified_base 17: mod_base = OTHER; note = Locked nucleic acid with guanine base
  modified_base 18: mod_base = OTHER; note = Locked nucleic acid with thymine base
  modified_base 19: mod_base = OTHER; note = 2'-O-methoxyethyl guanosine
  modified_base 20: mod_base = OTHER; note = 2'-O-methoxyethyl 5-methylcytidine
  misc_feature 1: note = RNA
  misc_feature 2: note = DNA
  misc_feature 3..5: note = RNA
  misc_feature 6..15: note = DNA
  misc_feature 16..20: note = RNA
gcagaggtgaagcgaagtgc

SEQ ID NO: 445 - DNA, 20 bp, synthetic construct
  source 1..20: mol_type = other DNA
  modified_base 1: mod_base = OTHER; note = 2'-O-methoxyethyl guanosine
  modified_base 2: mod_base = OTHER; note = 2'-O-methoxyethyl 5-methylcytidine
  modified_base 3: mod_base = OTHER; note = 2'-O-methoxyethyl adenosine
  modified_base 4: mod_base = OTHER; note = 2'-O-methoxyethyl guanosine
  modified_base 13: mod_base = OTHER; note = 2'-deoxy 5-methylcytidine
  modified_base 16: mod_base = OTHER; note = 2'-O-methoxyethyl adenosine
  modified_base 17: mod_base = OTHER; note = Locked nucleic acid with guanine base
  modified_base 18: mod_base = OTHER; note = Locked nucleic acid with thymine base
  modified_base 19: mod_base = OTHER; note = 2'-O-methoxyethyl guanosine
  modified_base 20: mod_base = OTHER; note = 2'-O-methoxyethyl 5-methylcytidine
  misc_feature 1..4: note = RNA
  misc_feature 5..15: note = DNA
  misc_feature 16..20: note = RNA
gcagaggtgaagcgaagtgc

SEQ ID NO: 446 - DNA, 20 bp, synthetic construct
  source 1..20: mol_type = other DNA
  modified_base 1: mod_base = OTHER; note = 2'-O-methoxyethyl guanosine
  modified_base 2: mod_base = OTHER; note = 2'-deoxy 5-methylcytidine
  modified_base 3: mod_base = OTHER; note = 2'-O-methoxyethyl adenosine
  modified_base 4: mod_base = OTHER; note = 2'-O-methoxyethyl guanosine
  modified_base 13: mod_base = OTHER; note = 2'-deoxy 5-methylcytidine
  modified_base 16: mod_base = OTHER; note = 2'-O-methoxyethyl adenosine
  modified_base 17: mod_base = OTHER; note = Locked nucleic acid with guanine base
  modified_base 18: mod_base = OTHER; note = Locked nucleic acid with thymine base
  modified_base 19: mod_base = OTHER; note = 2'-O-methoxyethyl guanosine
  modified_base 20: mod_base = OTHER; note = 2'-O-methoxyethyl 5-methylcytidine
  misc_feature 1: note = RNA
  misc_feature 2: note = DNA
  misc_feature 3..4: note = RNA
  misc_feature 5..15: note = DNA
  misc_feature 16..20: note = RNA
gcagaggtgaagcgaagtgc

SEQ ID NO: 447 - DNA, 20 bp, synthetic construct
  source 1..20: mol_type = other DNA
  modified_base 1: mod_base = OTHER; note = 2'-O-methoxyethyl guanosine
  modified_base 2: mod_base = OTHER; note = 2'-O-methoxyethyl 5-methylcytidine
  modified_base 3: mod_base = OTHER; note = 2'-O-methoxyethyl adenosine
  modified_base 4: mod_base = OTHER; note = 2'-O-methoxyethyl guanosine
  modified_base 10: mod_base = OTHER; note = 2'-O-methoxyethyl adenosine
  modified_base 13: mod_base = OTHER; note = 2'-deoxy 5-methylcytidine
  modified_base 16: mod_base = OTHER; note = 2'-O-methoxyethyl adenosine
  modified_base 17: mod_base = OTHER; note = 2'-O-methoxyethyl guanosine
  modified_base 18: mod_base = OTHER; note = 2'-O-methoxyethyl thymidine
  modified_base 19: mod_base = OTHER; note = 2'-O-methoxyethyl guanosine
  modified_base 20: mod_base = OTHER; note = 2'-O-methoxyethyl 5-methylcytidine
  misc_feature 1..4: note = RNA
  misc_feature 5..9: note = DNA
  misc_feature 10: note = RNA
  misc_feature 11..15: note = DNA
  misc_feature 16..20: note = RNA
gcagaggtgaagcgaagtgc

SEQ ID NO: 448 - DNA, 20 bp, synthetic construct
  source 1..20: mol_type = other DNA
  modified_base 1: mod_base = OTHER; note = 2'-O-methoxyethyl guanosine
  modified_base 2: mod_base = OTHER; note = 2'-deoxy 5-methylcytidine
  modified_base 3: mod_base = OTHER; note = 2'-O-methoxyethyl adenosine
  modified_base 4: mod_base = OTHER; note = 2'-O-methoxyethyl guanosine
  modified_base 10: mod_base = OTHER; note = 2'-O-methoxyethyl adenosine
  modified_base 13: mod_base = OTHER; note = 2'-deoxy 5-methylcytidine
  modified_base 16: mod_base = OTHER; note = 2'-O-methoxyethyl adenosine
  modified_base 17: mod_base = OTHER; note = 2'-O-methoxyethyl guanosine
  modified_base 18: mod_base = OTHER; note = 2'-O-methoxyethyl thymidine
  modified_base 19: mod_base = OTHER; note = 2'-O-methoxyethyl guanosine
  modified_base 20: mod_base = OTHER; note = 2'-O-methoxyethyl 5-methylcytidine
  misc_feature 1: note = RNA
  misc_feature 2: note = DNA
  misc_feature 3..4: note = RNA
  misc_feature 5..9: note = DNA
  misc_feature 10: note = RNA
  misc_feature 11..15: note = DNA
  misc_feature 16..20: note = RNA
gcagaggtgaagcgaagtgc

SEQ ID NO: 449 - DNA, 20 bp, synthetic construct
  source 1..20: mol_type = other DNA
  modified_base 1: mod_base = OTHER; note = 2'-O-methoxyethyl guanosine
  modified_base 2: mod_base = OTHER; note = 2'-O-methoxyethyl 5-methylcytidine
  modified_base 4: mod_base = OTHER; note = 2'-O-methoxyethyl guanosine
  modified_base 5: mod_base = OTHER; note = 2'-O-methoxyethyl adenosine
  modified_base 10: mod_base = OTHER; note = 2'-O-methoxyethyl adenosine
  modified_base 13: mod_base = OTHER; note = 2'-deoxy 5-methylcytidine
  modified_base 16: mod_base = OTHER; note = 2'-O-methoxyethyl adenosine
  modified_base 17: mod_base = OTHER; note = 2'-O-methoxyethyl guanosine
  modified_base 18: mod_base = OTHER; note = 2'-O-methoxyethyl thymidine
  modified_base 19: mod_base = OTHER; note = 2'-O-methoxyethyl guanosine
  modified_base 20: mod_base = OTHER; note = 2'-O-methoxyethyl 5-methylcytidine
  misc_feature 1..2: note = RNA
  misc_feature 3: note = DNA
  misc_feature 4..5: note = RNA
  misc_feature 6..9: note = DNA
  misc_feature 10: note = RNA
  misc_feature 11..15: note = DNA
  misc_feature 16..20: note = RNA
gcagaggtgaagcgaagtgc

SEQ ID NO: 450 - DNA, 20 bp, synthetic construct
  source 1..20: mol_type = other DNA
  modified_base 1: mod_base = OTHER; note = 2'-O-methoxyethyl guanosine
  modified_base 2: mod_base = OTHER; note = 2'-deoxy 5-methylcytidine
  modified_base 3: mod_base = OTHER; note = 2'-O-methoxyethyl adenosine
  modified_base 5: mod_base = OTHER; note = 2'-O-methoxyethyl adenosine
  modified_base 10: mod_base = OTHER; note = 2'-O-methoxyethyl adenosine
  modified_base 13: mod_base = OTHER; note = 2'-deoxy 5-methylcytidine
  modified_base 16: mod_base = OTHER; note = 2'-O-methoxyethyl adenosine
  modified_base 17: mod_base = OTHER; note = 2'-O-methoxyethyl guanosine
  modified_base 18: mod_base = OTHER; note = 2'-O-methoxyethyl thymidine
  modified_base 19: mod_base = OTHER; note = 2'-O-methoxyethyl guanosine
  modified_base 20: mod_base = OTHER; note = 2'-O-methoxyethyl 5-methylcytidine
  misc_feature 1: note = RNA
  misc_feature 2: note = DNA
  misc_feature 3: note = RNA
  misc_feature 4: note = DNA
  misc_feature 5: note = RNA
  misc_feature 6..9: note = DNA
  misc_feature 10: note = RNA
  misc_feature 11..15: note = DNA
  misc_feature 16..20: note = RNA
gcagaggtgaagcgaagtgc

SEQ ID NO: 451 - DNA, 20 bp, synthetic construct
  source 1..20: mol_type = other DNA
  modified_base 1: mod_base = OTHER; note = 2'-O-methoxyethyl guanosine
  modified_base 2: mod_base = OTHER; note = 2'-deoxy 5-methylcytidine
  modified_base 3: mod_base = OTHER; note = 2'-O-methoxyethyl adenosine
  modified_base 4: mod_base = OTHER; note = 2'-O-methoxyethyl guanosine
  modified_base 10: mod_base = OTHER; note = 2'-O-methoxyethyl adenosine
  modified_base 13: mod_base = OTHER; note = 2'-deoxy 5-methylcytidine
  modified_base 15: mod_base = OTHER; note = 2'-O-methoxyethyl adenosine
  modified_base 16: mod_base = OTHER; note = 2'-O-methoxyethyl adenosine
  modified_base 17: mod_base = OTHER; note = Locked nucleic acid with guanine base
  modified_base 18: mod_base = OTHER; note = Locked nucleic acid with thymine base
  modified_base 19: mod_base = OTHER; note = 2'-O-methoxyethyl guanosine
  modified_base 20: mod_base = OTHER; note = 2'-O-methoxyethyl 5-methylcytidine
  misc_feature 1: note = RNA
  misc_feature 2: note = DNA
  misc_feature 3..4: note = RNA
  misc_feature 5..9: note = DNA
  misc_feature 10: note = RNA
  misc_feature 11..14: note = DNA
  misc_feature 15..20: note = RNA
gcagaggtgaagcgaagtgc

SEQ ID NO: 452 - DNA, 20 bp, synthetic construct
  source 1..20: mol_type = other DNA
  modified_base 1: mod_base = OTHER; note = 2'-O-methoxyethyl guanosine
  modified_base 2: mod_base = OTHER; note = 2'-O-methoxyethyl 5-methylcytidine
  modified_base 3: mod_base = OTHER; note = 2'-O-methoxyethyl adenosine
  modified_base 4: mod_base = OTHER; note = 2'-O-methoxyethyl guanosine
  modified_base 10: mod_base = OTHER; note = 2'-O-methoxyethyl adenosine
  modified_base 13: mod_base = OTHER; note = 2'-deoxy 5-methylcytidine
  modified_base 15: mod_base = OTHER; note = 2'-O-methoxyethyl adenosine
  modified_base 16: mod_base = OTHER; note = 2'-O-methoxyethyl adenosine
  modified_base 17: mod_base = OTHER; note = Locked nucleic acid with guanine base
  modified_base 18: mod_base = OTHER; note = Locked nucleic acid with thymine base
  modified_base 19: mod_base = OTHER; note = 2'-O-methoxyethyl guanosine
  modified_base 20: mod_base = OTHER; note = 2'-O-methoxyethyl 5-methylcytidine
  misc_feature 1..4: note = RNA
  misc_feature 5..9: note = DNA
  misc_feature 10: note = RNA
  misc_feature 11..14: note = DNA
  misc_feature 15..20: note = RNA
gcagaggtgaagcgaagtgc

SEQ ID NO: 453 - DNA, 20 bp, synthetic construct
  source 1..20: mol_type = other DNA
  modified_base 1: mod_base = OTHER; note = 2'-O-methoxyethyl guanosine
  modified_base 2: mod_base = OTHER; note = 2'-O-methoxyethyl 5-methylcytidine
  modified_base 3: mod_base = OTHER; note = 2'-O-methoxyethyl adenosine
  modified_base 4: mod_base = OTHER; note = 2'-O-methoxyethyl guanosine
  modified_base 5: mod_base = OTHER; note = 2'-O-methoxyethyl adenosine
  modified_base 10: mod_base = OTHER; note = 2'-O-methoxyethyl adenosine
  modified_base 13: mod_base = OTHER; note = 2'-deoxy 5-methylcytidine
  modified_base 15: mod_base = OTHER; note = 2'-O-methoxyethyl adenosine
  modified_base 16: mod_base = OTHER; note = 2'-O-methoxyethyl adenosine
  modified_base 17: mod_base = OTHER; note = Locked nucleic acid with guanine base
  modified_base 18: mod_base = OTHER; note = Locked nucleic acid with thymine base
  modified_base 19: mod_base = OTHER; note = 2'-O-methoxyethyl guanosine
  modified_base 20: mod_base = OTHER; note = 2'-O-methoxyethyl 5-methylcytidine
  misc_feature 1..5: note = RNA
  misc_feature 6..9: note = DNA
  misc_feature 10: note = RNA
  misc_feature 11..14: note = DNA
  misc_feature 15..20: note = RNA
gcagaggtgaagcgaagtgc

SEQ ID NO: 454 - DNA, 16 bp, synthetic construct
  source 1..16: mol_type = other DNA
  modified_base 1: mod_base = OTHER; note = Locked nucleic acid with guanine base
  modified_base 2: mod_base = OTHER; note = Locked nucleic acid with thymine base
  modified_base 3: mod_base = OTHER; note = Locked nucleic acid with cytosine base
  modified_base 8: mod_base = OTHER; note = 2'-deoxy 5-methylcytidine
  modified_base 11: mod_base = OTHER; note = 2'-deoxy 5-methylcytidine
  modified_base 13: mod_base = OTHER; note = 2'-deoxy 5-methylcytidine
  modified_base 14: mod_base = OTHER; note = Locked nucleic acid with thymine base
  modified_base 15: mod_base = OTHER; note = Locked nucleic acid with cytosine base
  modified_base 16: mod_base = OTHER; note = Locked nucleic acid with cytosine base
  misc_feature 1..3: note = RNA
  misc_feature 4..13: note = DNA
  misc_feature 14..16: note = RNA
gtctgtgcatctctcc

SEQ ID NO: 455 - DNA, 20 bp, synthetic construct
  source 1..20: mol_type = other DNA
  modified_base 1: mod_base = OTHER; note = 2'-O-methoxyethyl guanosine
  modified_base 2: mod_base = OTHER; note = 2'-O-methoxyethyl 5-methylcytidine
  modified_base 3: mod_base = OTHER; note = 2'-O-methoxyethyl adenosine
  modified_base 4: mod_base = OTHER; note = 2'-O-methoxyethyl guanosine
  modified_base 10: mod_base = OTHER; note = 2'-O-methoxyethyl adenosine
  modified_base 13: mod_base = OTHER; note = 2'-deoxy 5-methylcytidine
  modified_base 16: mod_base = OTHER; note = 2'-O-methoxyethyl adenosine
  modified_base 17: mod_base = OTHER; note = Locked nucleic acid with guanine base
  modified_base 18: mod_base = OTHER; note = Locked nucleic acid with thymine base
  modified_base 19: mod_base = OTHER; note = 2'-O-methoxyethyl guanosine
  modified_base 20: mod_base = OTHER; note = 2'-O-methoxyethyl 5-methylcytidine
  misc_feature 1..4: note = RNA
  misc_feature 5..9: note = DNA
  misc_feature 10: note = RNA
  misc_feature 11..15: note = DNA
  misc_feature 16..20: note = RNA
gcagaggtgaagcgaagtgc

SEQ ID NO: 456 - DNA, 20 bp, synthetic construct
  source 1..20: mol_type = other DNA
  modified_base 1: mod_base = OTHER; note = 2'-O-methoxyethyl guanosine
  modified_base 2: mod_base = OTHER; note = 2'-O-methoxyethyl 5-methylcytidine
  modified_base 3: mod_base = OTHER; note = 2'-O-methoxyethyl adenosine
  modified_base 4: mod_base = OTHER; note = 2'-O-methoxyethyl guanosine
  modified_base 10: mod_base = OTHER; note = 2'-O-methoxyethyl adenosine
  modified_base 13: mod_base = OTHER; note = 2'-deoxy 5-methylcytidine
  modified_base 16: mod_base = OTHER; note = 2'-O-methoxyethyl adenosine
  modified_base 17: mod_base = OTHER; note = Locked nucleic acid with guanine base
  modified_base 18: mod_base = OTHER; note = 2'-O-methoxyethyl thymidine
  modified_base 19: mod_base = OTHER; note = Locked nucleic acid with guanine base
  modified_base 20: mod_base = OTHER; note = Locked nucleic acid with 5-methylcytidine base
  misc_feature 1..4: note = RNA
  misc_feature 5..9: note = DNA
  misc_feature 10: note = RNA
  misc_feature 11..15: note = DNA
  misc_feature 16..20: note = RNA
gcagaggtgaagcgaagtgc

SEQ ID NO: 457 - DNA, 20 bp, synthetic construct
  source 1..20: mol_type = other DNA
  modified_base 1: mod_base = OTHER; note = 2'-O-methoxyethyl guanosine
  modified_base 2: mod_base = OTHER; note = 2'-O-methoxyethyl 5-methylcytidine
  modified_base 3: mod_base = OTHER; note = 2'-O-methoxyethyl adenosine
  modified_base 4: mod_base = OTHER; note = 2'-O-methoxyethyl guanosine
  modified_base 10: mod_base = OTHER; note = 2'-O-methoxyethyl adenosine
  modified_base 13: mod_base = OTHER; note = 2'-deoxy 5-methylcytidine
  modified_base 16: mod_base = OTHER; note = Locked nucleic acid with adenine base
  modified_base 17: mod_base = OTHER; note = 2'-O-methoxyethyl guanosine
  modified_base 18: mod_base = OTHER; note = 2'-O-methoxyethyl thymidine
  modified_base 19: mod_base = OTHER; note = Locked nucleic acid with guanine base
  modified_base 20: mod_base = OTHER; note = 2'-O-methoxyethyl 5-methylcytidine
  misc_feature 1..4: note = RNA
  misc_feature 5..9: note = DNA
  misc_feature 10: note = RNA
  misc_feature 11..15: note = DNA
  misc_feature 16..20: note = RNA
gcagaggtgaagcgaagtgc

SEQ ID NO: 458 - DNA, 20 bp, synthetic construct
  source 1..20: mol_type = other DNA
  modified_base 1: mod_base = OTHER; note = 2'-O-methoxyethyl guanosine
  modified_base 2: mod_base = OTHER; note = 2'-O-methoxyethyl 5-methylcytidine
  modified_base 3: mod_base = OTHER; note = 2'-O-methoxyethyl adenosine
  modified_base 4: mod_base = OTHER; note = 2'-O-methoxyethyl guanosine
  modified_base 10: mod_base = OTHER; note = 2'-O-methoxyethyl adenosine
  modified_base 13: mod_base = OTHER; note = 2'-deoxy 5-methylcytidine
  modified_base 16: mod_base = OTHER; note = 2'-O-methoxyethyl adenosine
  modified_base 17: mod_base = OTHER; note = Locked nucleic acid with guanine base
  modified_base 18: mod_base = OTHER; note = 2'-O-methoxyethyl thymidine
  modified_base 19: mod_base = OTHER; note = 2'-O-methoxyethyl guanosine
  modified_base 20: mod_base = OTHER; note = Locked nucleic acid with 5-methylcytidine base
  misc_feature 1..4: note = RNA
  misc_feature 5..9: note = DNA
  misc_feature 10: note = RNA
  misc_feature 11..15: note = DNA
  misc_feature 16..20: note = RNA
gcagaggtgaagcgaagtgc

SEQ ID NO: 459 - DNA, 20 bp, synthetic construct
  source 1..20: mol_type = other DNA
  modified_base 1: mod_base = OTHER; note = 2'-O-methoxyethyl guanosine
  modified_base 2: mod_base = OTHER; note = 2'-deoxy 5-methylcytidine
  modified_base 3: mod_base = OTHER; note = 2'-O-methoxyethyl adenosine
  modified_base 4: mod_base = OTHER; note = 2'-O-methoxyethyl guanosine
  modified_base 5: mod_base = OTHER; note = 2'-O-methoxyethyl adenosine
  modified_base 10: mod_base = OTHER; note = 2'-O-methoxyethyl adenosine
  modified_base 13: mod_base = OTHER; note = 2'-deoxy 5-methylcytidine
  modified_base 16: mod_base = OTHER; note = 2'-O-methoxyethyl adenosine
  modified_base 17: mod_base = OTHER; note = Locked nucleic acid with guanine base
  modified_base 18: mod_base = OTHER; note = Locked nucleic acid with thymine base
  modified_base 19: mod_base = OTHER; note = 2'-O-methoxyethyl guanosine
  modified_base 20: mod_base = OTHER; note = 2'-O-methoxyethyl 5-methylcytidine
  misc_feature 1: note = RNA
  misc_feature 2: note = DNA
  misc_feature 3..5: note = RNA
  misc_feature 6..9: note = DNA
  misc_feature 10: note = RNA
  misc_feature 11..15: note = DNA
  misc_feature 16..20: note = RNA
gcagaggtgaagcgaagtgc

SEQ ID NO: 460 - DNA, 20 bp, synthetic construct
  source 1..20: mol_type = other DNA
  modified_base 1: mod_base = OTHER; note = 2'-O-methoxyethyl guanosine
  modified_base 2: mod_base = OTHER; note = 2'-deoxy 5-methylcytidine
  modified_base 3: mod_base = OTHER; note = 2'-O-methoxyethyl adenosine
  modified_base 4: mod_base = OTHER; note = 2'-O-methoxyethyl guanosine
  modified_base 10: mod_base = OTHER; note = 2'-O-methoxyethyl adenosine
  modified_base 13: mod_base = OTHER; note = 2'-deoxy 5-methylcytidine
  modified_base 15: mod_base = OTHER; note = 2'-O-methoxyethyl adenosine
  modified_base 16: mod_base = OTHER; note = 2'-O-methoxyethyl adenosine
  modified_base 17: mod_base = OTHER; note = Locked nucleic acid with guanine base
  modified_base 18: mod_base = OTHER; note = Locked nucleic acid with thymine base
  modified_base 19: mod_base = OTHER; note = 2'-O-methoxyethyl guanosine
  modified_base 20: mod_base = OTHER; note = 2'-O-methoxyethyl 5-methylcytidine
  misc_feature 1: note = RNA
  misc_feature 2: note = DNA
  misc_feature 3..4: note = RNA
  misc_feature 5..9: note = DNA
  misc_feature 10: note = RNA
  misc_feature 11..14: note = DNA
  misc_feature 15..20: note = RNA
gcagaggtgaagcgaagtgc

SEQ ID NO: 461 - DNA, 20 bp, synthetic construct
  source 1..20: mol_type = other DNA
  modified_base 1: mod_base = OTHER; note = 2'-O-methoxyethyl guanosine
  modified_base 2: mod_base = OTHER; note = 2'-deoxy 5-methylcytidine
  modified_base 3: mod_base = OTHER; note = 2'-O-methoxyethyl adenosine
  modified_base 4: mod_base = OTHER; note = 2'-O-methoxyethyl guanosine
  modified_base 5: mod_base = OTHER; note = 2'-O-methoxyethyl adenosine
  modified_base 10: mod_base = OTHER; note = 2'-O-methoxyethyl adenosine
  modified_base 13: mod_base = OTHER; note = 2'-deoxy 5-methylcytidine
  modified_base 15: mod_base = OTHER; note = 2'-O-methoxyethyl adenosine
  modified_base 16: mod_base = OTHER; note = 2'-O-methoxyethyl adenosine
  modified_base 17: mod_base = OTHER; note = Locked nucleic acid with guanine base
  modified_base 18: mod_base = OTHER; note = Locked nucleic acid with thymine base
  modified_base 19: mod_base = OTHER; note = 2'-O-methoxyethyl guanosine
  modified_base 20: mod_base = OTHER; note = 2'-O-methoxyethyl 5-methylcytidine
  misc_feature 1: note = RNA
  misc_feature 2: note = DNA
  misc_feature 3..5: note = RNA
  misc_feature 6..9: note = DNA
  misc_feature 10: note = RNA
  misc_feature 11..14: note = DNA
  misc_feature 15..20: note = RNA
gcagaggtgaagcgaagtgc

SEQ ID NO: 462 - DNA, 20 bp, synthetic construct
  source 1..20: mol_type = other DNA
  modified_base 1: mod_base = OTHER; note = 2'-O-methoxyethyl guanosine
  modified_base 2: mod_base = OTHER; note = 2'-deoxy 5-methylcytidine
  modified_base 3: mod_base = OTHER; note = 2'-O-methoxyethyl adenosine
  modified_base 4: mod_base = OTHER; note = 2'-O-methoxyethyl guanosine
  modified_base 5: mod_base = OTHER; note = 2'-O-methoxyethyl adenosine
  modified_base 10: mod_base = OTHER; note = 2'-O-methoxyethyl adenosine
  modified_base 13: mod_base = OTHER; note = 2'-deoxy 5-methylcytidine
  modified_base 16: mod_base = OTHER; note = 2'-O-methoxyethyl adenosine
  modified_base 17: mod_base = OTHER; note = Locked nucleic acid with guanine base
  modified_base 18: mod_base = OTHER; note = 2'-O-methoxyethyl thymidine
  modified_base 19: mod_base = OTHER; note = 2'-O-methoxyethyl guanosine
  modified_base 20: mod_base = OTHER; note = Locked nucleic acid with 5-methylcytidine base
  misc_feature 1: note = RNA
  misc_feature 2: note = DNA
  misc_feature 3..5: note = RNA
  misc_feature 6..9: note = DNA
  misc_feature 10: note = RNA
  misc_feature 11..15: note = DNA
  misc_feature 16..20: note = RNA
gcagaggtgaagcgaagtgc

SEQ ID NO: 463 - DNA, 20 bp, synthetic construct
  source 1..20: mol_type = other DNA
  modified_base 1: mod_base = OTHER; note = 2'-O-methoxyethyl guanosine
  modified_base 2: mod_base = OTHER; note = 2'-deoxy 5-methylcytidine
  modified_base 3: mod_base = OTHER; note = 2'-O-methoxyethyl adenosine
  modified_base 4: mod_base = OTHER; note = 2'-O-methoxyethyl guanosine
  modified_base 5: mod_base = OTHER; note = 2'-O-methoxyethyl adenosine
  modified_base 10: mod_base = OTHER; note = 2'-O-methoxyethyl adenosine
  modified_base 13: mod_base = OTHER; note = 2'-deoxy 5-methylcytidine
  modified_base 16: mod_base = OTHER; note = Locked nucleic acid with adenine base
  modified_base 17: mod_base = OTHER; note = 2'-O-methoxyethyl guanosine
  modified_base 18: mod_base = OTHER; note = 2'-O-methoxyethyl thymidine
  modified_base 19: mod_base = OTHER; note = Locked nucleic acid with guanine base
  modified_base 20: mod_base = OTHER; note = 2'-O-methoxyethyl 5-methylcytidine
  misc_feature 1: note = RNA
  misc_feature 2: note = DNA
  misc_feature 3..5: note = RNA
  misc_feature 6..9: note = DNA
  misc_feature 10: note = RNA
  misc_feature 11..15: note = DNA
  misc_feature 16..20: note = RNA
gcagaggtgaagcgaagtgc

SEQ ID NO: 464 - DNA, 20 bp, synthetic construct
  source 1..20: mol_type = other DNA
  modified_base 1: mod_base = OTHER; note = 2'-O-methoxyethyl guanosine
  modified_base 2: mod_base = OTHER; note = 2'-O-methoxyethyl 5-methylcytidine
  modified_base 3: mod_base = OTHER; note = 2'-O-methoxyethyl adenosine
  modified_base 5: mod_base = OTHER; note = 2'-O-methoxyethyl adenosine
  modified_base 10: mod_base = OTHER; note = 2'-O-methoxyethyl adenosine
  modified_base 13: mod_base = OTHER; note = 2'-deoxy 5-methylcytidine
  modified_base 16: mod_base = OTHER; note = 2'-O-methoxyethyl adenosine
  modified_base 17: mod_base = OTHER; note = 2'-O-methoxyethyl guanosine
  modified_base 18: mod_base = OTHER; note = 2'-O-methoxyethyl thymidine
  modified_base 19: mod_base = OTHER; note = 2'-O-methoxyethyl guanosine
  modified_base 20: mod_base = OTHER; note = 2'-O-methoxyethyl 5-methylcytidine
  misc_feature 1..3: note = RNA
  misc_feature 4: note = DNA
  misc_feature 5: note = RNA
  misc_feature 6..9: note = DNA
  misc_feature 10: note = RNA
  misc_feature 11..15: note = DNA
  misc_feature 16..20: note = RNA
gcagaggtgaagcgaagtgc

SEQ ID NO: 465 - DNA, 20 bp, synthetic construct
  source 1..20: mol_type = other DNA
  modified_base 1: mod_base = OTHER; note = 2'-O-methoxyethyl guanosine
  modified_base 2: mod_base = OTHER; note = 2'-O-methoxyethyl 5-methylcytidine
  modified_base 3: mod_base = OTHER; note = 2'-O-methoxyethyl adenosine
  modified_base 4: mod_base = OTHER; note = 2'-O-methoxyethyl guanosine
  modified_base 10: mod_base = OTHER; note = 2'-O-methoxyethyl adenosine
  modified_base 13: mod_base = OTHER; note = 2'-deoxy 5-methylcytidine
  modified_base 16: mod_base = OTHER; note = 2'-O-methoxyethyl adenosine
  modified_base 17: mod_base = OTHER; note = Locked nucleic acid with guanine base
  modified_base 18: mod_base = OTHER; note = 2'-O-methoxyethyl thymidine
  modified_base 19: mod_base = OTHER; note = Locked nucleic acid with guanine base
  modified_base 20: mod_base = OTHER; note = Locked nucleic acid with 5-methylcytidine base
  misc_feature 1..4: note = RNA
  misc_feature 5..9: note = DNA
  misc_feature 10: note = RNA
  misc_feature 11..15: note = DNA
  misc_feature 16..20: note = RNA
gcagaggtgaagcgaagtgc

SEQ ID NO: 466 - DNA, 20 bp, synthetic construct
  source 1..20: mol_type = other DNA
  modified_base 1: mod_base = OTHER; note = 2'-O-methoxyethyl adenosine
  modified_base 2: mod_base = OTHER; note = 2'-O-methoxyethyl guanosine
  modified_base 3: mod_base = OTHER; note = 2'-O-methoxyethyl adenosine
  modified_base 4: mod_base = OTHER; note = 2'-O-methoxyethyl guanosine
  modified_base 5: mod_base = OTHER; note = 2'-O-methoxyethyl guanosine
  modified_base 6: mod_base = OTHER; note = 2'-deoxy 5-methylcytidine
  modified_base 14: mod_base = OTHER; note = 2'-deoxy 5-methylcytidine
  modified_base 15: mod_base = OTHER; note = 2'-deoxy 5-methylcytidine
  modified_base 16: mod_base = OTHER; note = 2'-O-methoxyethyl thymidine
  modified_base 17: mod_base = OTHER; note = 2'-O-methoxyethyl adenosine
  modified_base 18: mod_base = OTHER; note = 2'-O-methoxyethyl adenosine
  modified_base 19: mod_base = OTHER; note = 2'-O-methoxyethyl guanosine
  modified_base 20: mod_base = OTHER; note = 2'-O-methoxyethyl guanosine
  misc_feature 1..5: note = RNA
  misc_feature 6..15: note = DNA
  misc_feature 16..20: note = RNA
agaggcaggagtgcctaagg

SEQ ID NO: 467 - DNA, 20 bp, synthetic construct
  source 1..20: mol_type = other DNA
  modified_base 1: mod_base = OTHER; note = 2'-O-methyl 5-methylcytidine
  modified_base 2: mod_base = OTHER; note = 2'-O-methyl 5-methylcytidine
  modified_base 3: mod_base = OTHER; note = 2'-O-methyl guanosine
  modified_base 4: mod_base = OTHER; note = 2'-O-methyl uridine
  modified_base 5: mod_base = OTHER; note = 2'-O-methyl guanosine
  modified_base 8: mod_base = OTHER; note = 2'-deoxy cytidine
  modified_base 10: mod_base = OTHER; note = 2'-deoxy cytidine
  modified_base 13: mod_base = OTHER; note = 2'-deoxy cytidine
  modified_base 15: mod_base = OTHER; note = 2'-deoxy cytidine
  modified_base 16: mod_base = OTHER; note = 2'-O-methyl uridine
  modified_base 17: mod_base = OTHER; note = 2'-O-methyl uridine
  modified_base 18: mod_base = OTHER; note = 2'-O-methyl 5-methylcytidine
  modified_base 19: mod_base = OTHER; note = 2'-O-methyl adenosine
  modified_base 20: mod_base = OTHER; note = 2'-O-methyl 5-methylcytidine
  misc_feature 1..5: note = RNA
  misc_feature 6..15: note = DNA
  misc_feature 16..20: note = RNA
ccgtgtgcacttcgcttcac

SEQ ID NO: 468 - DNA, 20 bp, synthetic construct
  source 1..20: mol_type = other DNA
  modified_base 1: mod_base = OTHER; note = 2'-O-methyl 5-methylcytidine
  modified_base 2: mod_base = OTHER; note = 2'-O-methyl uridine
  modified_base 3: mod_base = OTHER; note = 2'-O-methyl guanosine
  modified_base 4: mod_base = OTHER; note = 2'-O-methyl guanosine
  modified_base 5: mod_base = OTHER; note = 2'-O-methyl 5-methylcytidine
  modified_base 7: mod_base = OTHER; note = 2'-deoxy cytidine
  modified_base 14: mod_base = OTHER; note = 2'-deoxy cytidine
  modified_base 16: mod_base = OTHER; note = 2'-O-methyl adenosine
  modified_base 17: mod_base = OTHER; note = 2'-O-methyl guanosine
  modified_base 18: mod_base = OTHER; note = 2'-O-methyl uridine
  modified_base 19: mod_base = OTHER; note = 2'-O-methyl guanosine
  modified_base 20: mod_base = OTHER; note = 2'-O-methyl 5-methylcytidine
  misc_feature 1..5: note = RNA
  misc_feature 6..15: note = DNA
  misc_feature 16..20: note = RNA
ctggctcagtttactagtgc

SEQ ID NO: 469 - DNA, 19 bp, synthetic construct
  source 1..19: mol_type = other DNA
  modified_base 1: mod_base = OTHER; note = 2'-O-methyl guanosine
  modified_base 2: mod_base = OTHER; note = 2'-O-methyl 5-methylcytidine
  modified_base 3: mod_base = OTHER; note = 2'-O-methyl 5-methylcytidine
  modified_base 4: mod_base = OTHER; note = 2'-O-methyl guanosine
  modified_base 5: mod_base = OTHER; note = 2'-O-methyl adenosine
  modified_base 7: mod_base = OTHER; note = 2'-deoxy cytidine
  modified_base 8: mod_base = OTHER; note = 2'-deoxy cytidine
  modified_base 12: mod_base = OTHER; note = 2'-deoxy cytidine
  modified_base 15: mod_base = OTHER; note = 2'-O-methyl guanosine
  modified_base 16: mod_base = OTHER; note = 2'-O-methyl guanosine
  modified_base 17: mod_base = OTHER; note = 2'-O-methyl adenosine
  modified_base 18: mod_base = OTHER; note = 2'-O-methyl adenosine
  modified_base 19: mod_base = OTHER; note = 2'-O-methyl 5-methylcytidine
  misc_feature 1..5: note = RNA
  misc_feature 6..14: note = DNA
  misc_feature 15..19: note = RNA
gccgatccatactgggaac

SEQ ID NO: 470 - DNA, 20 bp, synthetic construct
  source 1..20: mol_type = other DNA
  modified_base 1: mod_base = OTHER; note = 2'-O-methyl guanosine
  modified_base 2: mod_base = OTHER; note = 2'-O-methyl uridine
  modified_base 3: mod_base = OTHER; note = 2'-O-methyl guanosine
  modified_base 4: mod_base = OTHER; note = 2'-O-methyl guanosine
  modified_base 5: mod_base = OTHER; note = 2'-O-methyl adenosine
  modified_base 6: mod_base = OTHER; note = 2'-deoxy cytidine
  modified_base 9: mod_base = OTHER; note = 2'-deoxy cytidine
  modified_base 11: mod_base = OTHER; note = 2'-deoxy cytidine
  modified_base 13: mod_base = OTHER; note = 2'-deoxy cytidine
  modified_base 16: mod_base = OTHER; note = 2'-O-methyl uridine
  modified_base 17: mod_base = OTHER; note = 2'-O-methyl uridine
  modified_base 18: mod_base = OTHER; note = 2'-O-methyl uridine
  modified_base 19: mod_base = OTHER; note = 2'-O-methyl uridine
  modified_base 20: mod_base = OTHER; note = 2'-O-methyl 5-methylcytidine
  misc_feature 1..5: note = RNA
  misc_feature 6..15: note = DNA
  misc_feature 16..20: note = RNA
gtggacttctctcaattttc

SEQ ID NO: 471 - DNA, 20 bp, synthetic construct
  source 1..20: mol_type = other DNA
  modified_base 1: mod_base = OTHER; note = 2'-O-methyl 5-methylcytidine
  modified_base 2: mod_base = OTHER; note = 2'-O-methyl guanosine
  modified_base 3: mod_base = OTHER; note = 2'-O-methyl 5-methylcytidine
  modified_base 4: mod_base = OTHER; note = 2'-O-methyl uridine
  modified_base 5: mod_base = OTHER; note = 2'-O-methyl guanosine
  modified_base 10: mod_base = OTHER; note = 2'-deoxy cytidine
  modified_base 16: mod_base = OTHER; note = 2'-O-methyl uridine
  modified_base 17: mod_base = OTHER; note = 2'-O-methyl uridine
  modified_base 18: mod_base = OTHER; note = 2'-O-methyl guanosine
  modified_base 19: mod_base = OTHER; note = 2'-O-methyl guanosine
  modified_base 20: mod_base = OTHER; note = 2'-O-methyl uridine
  misc_feature 1..5: note = RNA
  misc_feature 6..15: note = DNA
  misc_feature 16..20: note = RNA
cgctgtaggcataaattggt

SEQ ID NO: 472 - DNA, 20 bp, synthetic construct
  source 1..20: mol_type = other DNA
  modified_base 1: mod_base = OTHER; note = 2'-O-methyl uridine
  modified_base 2: mod_base = OTHER; note = 2'-O-methyl guanosine
  modified_base 3: mod_base = OTHER; note = 2'-O-methyl adenosine
  modified_base 4: mod_base = OTHER; note = 2'-O-methyl 5-methylcytidine
  modified_base 5: mod_base = OTHER; note = 2'-O-methyl adenosine
  modified_base 11: mod_base = OTHER; note = 2'-deoxy cytidine
  modified_base 12: mod_base = OTHER; note = 2'-deoxy cytidine
  modified_base 14: mod_base = OTHER; note = 2'-deoxy cytidine
  modified_base 16: mod_base = OTHER; note = 2'-O-methyl 5-methylcytidine
  modified_base 17: mod_base = OTHER; note = 2'-O-methyl adenosine
  modified_base 18: mod_base = OTHER; note = 2'-O-methyl adenosine
  modified_base 19: mod_base = OTHER; note = 2'-O-methyl uridine
  modified_base 20: mod_base = OTHER; note = 2'-O-methyl adenosine
  misc_feature 1..5: note = RNA
  misc_feature 6..15: note = DNA
  misc_feature 16..20: note = RNA
tgacaagaatcctcacaata

SEQ ID NO: 473 - DNA, 20 bp, synthetic construct
  source 1..20: mol_type = other DNA
  modified_base 1: mod_base = OTHER; note = 2'-O-methyl guanosine
  modified_base 2: mod_base = OTHER; note = 2'-O-methyl adenosine
  modified_base 3: mod_base = OTHER; note = 2'-O-methyl 5-methylcytidine
  modified_base 4: mod_base = OTHER; note = 2'-O-methyl adenosine
  modified_base 5: mod_base = OTHER; note = 2'-O-methyl adenosine
  modified_base 10: mod_base = OTHER; note = 2'-deoxy cytidine
  modified_base 11: mod_base = OTHER; note = 2'-deoxy cytidine
  modified_base 13: mod_base = OTHER; note = 2'-deoxy cytidine
  modified_base 15: mod_base = OTHER; note = 2'-deoxy cytidine
  modified_base 16: mod_base = OTHER; note = 2'-O-methyl adenosine
  modified_base 17: mod_base = OTHER; note = 2'-O-methyl adenosine
  modified_base 18: mod_base = OTHER; note = 2'-O-methyl uridine
  modified_base 19: mod_base = OTHER; note = 2'-O-methyl adenosine
  modified_base 20: mod_base = OTHER; note = 2'-O-methyl 5-methylcytidine
  misc_feature 1..5: note = RNA
  misc_feature 6..15: note = DNA
  misc_feature 16..20: note = RNA
gacaagaatcctcacaatac

SEQ ID NO: 474 - DNA, 16 bp, synthetic construct
  source 1..16: mol_type = other DNA
  modified_base 1: mod_base = OTHER; note = 2'-O-methyl adenosine
  modified_base 2: mod_base = OTHER; note = 2'-O-methyl guanosine
  modified_base 3: mod_base = OTHER; note = 2'-O-methyl 5-methylcytidine
  modified_base 10: mod_base = OTHER; note = 2'-deoxy cytidine
  modified_base 12: mod_base = OTHER; note = 2'-deoxy cytidine
  modified_base 14: mod_base = OTHER; note = 2'-O-methyl 5-methylcytidine
  modified_base 15: mod_base = OTHER; note = 2'-O-methyl guanosine
  modified_base 16: mod_base = OTHER; note = 2'-O-methyl guanosine
  misc_feature 1..3: note = RNA
  misc_feature 4..13: note = DNA
  misc_feature 14..16: note = RNA
agcgaagtgcacacgg

SEQ ID NO: 475 - DNA, 20 bp, synthetic construct
  source 1..20: mol_type = other DNA
  modified_base 1: mod_base = OTHER; note = 2'-O-methyl uridine
  modified_base 2: mod_base = OTHER; note = 2'-O-methyl uridine
  modified_base 3: mod_base = OTHER; note = 2'-O-methyl 5-methylcytidine
  modified_base 4: mod_base = OTHER; note = 2'-O-methyl uridine
  modified_base 5: mod_base = OTHER; note = 2'-O-methyl uridine
  modified_base 6: mod_base = OTHER; note = 2'-deoxy cytidine
  modified_base 9: mod_base = OTHER; note = 2'-deoxy cytidine
  modified_base 16: mod_base = OTHER; note = 2'-O-methyl adenosine
  modified_base 17: mod_base = OTHER; note = 2'-O-methyl 5-methylcytidine
  modified_base 18: mod_base = OTHER; note = 2'-O-methyl 5-methylcytidine
  modified_base 19: mod_base = OTHER; note = 2'-O-methyl uridine
  modified_base 20: mod_base = OTHER; note = 2'-O-methyl guanosine
  misc_feature 1..5: note = RNA
  misc_feature 6..15: note = DNA
  misc_feature 16..20: note = RNA
ttcttcttctaggggacctg

SEQ ID NO: 476 - DNA, 20 bp, synthetic construct
  source 1..20: mol_type = other DNA
  modified_base 1: mod_base = OTHER; note = 2'-O-methyl adenosine
  modified_base 2: mod_base = OTHER; note = 2'-O-methyl 5-methylcytidine
  modified_base 3: mod_base = OTHER; note = 2'-O-methyl adenosine
  modified_base 4: mod_base = OTHER; note = 2'-O-methyl adenosine
  modified_base 5: mod_base = OTHER; note = 2'-O-methyl adenosine
  modified_base 6: mod_base = OTHER; note = 2'-deoxy cytidine
  modified_base 10: mod_base = OTHER; note = 2'-deoxy cytidine
  modified_base 13: mod_base = OTHER; note = 2'-deoxy cytidine
  modified_base 16: mod_base = OTHER; note = 2'-O-methyl adenosine
  modified_base 17: mod_base = OTHER; note = 2'-O-methyl 5-methylcytidine
  modified_base 18: mod_base = OTHER; note = 2'-O-methyl 5-methylcytidine
  modified_base 19: mod_base = OTHER; note = 2'-O-methyl uridine
  modified_base 20: mod_base = OTHER; note = 2'-O-methyl uridine
  misc_feature 1..5: note = RNA
  misc_feature 6..15: note = DNA
  misc_feature 16..20: note = RNA
acaaacgggcaacatacctt

SEQ ID NO: 477 - DNA, 20 bp, synthetic construct
  source 1..20: mol_type = other DNA
  modified_base 1: mod_base = OTHER; note = 2'-O-methyl guanosine
  modified_base 2: mod_base = OTHER; note = 2'-O-methyl guanosine
  modified_base 3: mod_base = OTHER; note = 2'-O-methyl adenosine
  modified_base 4: mod_base = OTHER; note = 2'-O-methyl uridine
  modified_base 5: mod_base = OTHER; note = 2'-O-methyl uridine
  modified_base 6: mod_base = OTHER; note = 2'-deoxy cytidine
  modified_base 9: mod_base = OTHER; note = 2'-deoxy cytidine
  modified_base 11: mod_base = OTHER; note = 2'-deoxy cytidine
  modified_base 12: mod_base = OTHER; note = 2'-deoxy cytidine
  modified_base 15: mod_base = OTHER; note = 2'-deoxy cytidine
  modified_base 16: mod_base = OTHER; note = 2'-O-methyl guanosine
  modified_base 17: mod_base = OTHER; note = 2'-O-methyl guanosine
  modified_base 18: mod_base = OTHER; note = 2'-O-methyl guanosine
  modified_base 19: mod_base = OTHER; note = 2'-O-methyl adenosine
  modified_base 20: mod_base = OTHER; note = 2'-O-methyl 5-methylcytidine
  misc_feature 1..5: note = RNA
  misc_feature 6..15: note = DNA
  misc_feature 16..20: note = RNA
ggattcagcgccgacgggac

SEQ ID NO: 478 - DNA, 19 bp, synthetic construct
  source 1..19: mol_type = other DNA
  modified_base 1: mod_base = OTHER; note = 2'-O-methyl 5-methylcytidine
  modified_base 2: mod_base = OTHER; note = 2'-O-methyl guanosine
  modified_base 3: mod_base = OTHER; note = 2'-O-methyl uridine
  modified_base 4: mod_base = OTHER; note = 2'-O-methyl guanosine
  modified_base 5: mod_base = OTHER; note = 2'-O-methyl guanosine
  modified_base 10: mod_base = OTHER; note = 2'-deoxy cytidine
  modified_base 13: mod_base = OTHER; note = 2'-deoxy cytidine
  modified_base 15: mod_base = OTHER; note = 2'-O-methyl 5-methylcytidine
  modified_base 16: mod_base = OTHER; note = 2'-O-methyl uridine
  modified_base 17: mod_base = OTHER; note = 2'-O-methyl 5-methylcytidine
  modified_base 18: mod_base = OTHER; note = 2'-O-methyl adenosine
  modified_base 19: mod_base = OTHER; note = 2'-O-methyl adenosine
  misc_feature 1..5: note = RNA
  misc_feature 6..14: note = DNA
  misc_feature 15..19: note = RNA
cgtggtggacttctctcaa

SEQ ID NO: 479 - DNA, 20 bp, synthetic construct
  source 1..20: mol_type = other DNA
  modified_base 1: mod_base = OTHER; note = 2'-O-methyl 5-methylcytidine
  modified_base 2: mod_base = OTHER; note = 2'-O-methyl 5-methylcytidine
  modified_base 3: mod_base = OTHER; note = 2'-O-methyl uridine
  modified_base 4: mod_base = OTHER; note = 2'-O-methyl uridine
  modified_base 5: mod_base = OTHER; note = 2'-O-methyl 5-methylcytidine
  modified_base 6: mod_base = OTHER; note = 2'-deoxy cytidine
  modified_base 7: mod_base = OTHER; note = 2'-deoxy cytidine
  modified_base 16: mod_base = OTHER; note = 2'-O-methyl 5-methylcytidine
  modified_base 17: mod_base = OTHER; note = 2'-O-methyl 5-methylcytidine
  modified_base 18: mod_base = OTHER; note = 2'-O-methyl uridine
  modified_base 19: mod_base = OTHER; note = 2'-O-methyl 5-methylcytidine
  modified_base 20: mod_base = OTHER; note = 2'-O-methyl 5-methylcytidine
  misc_feature 1..5: note = RNA
  misc_feature 6..15: note = DNA
  misc_feature 16..20: note = RNA
ccttccctgaaggttcctcc

SEQ ID NO: 480 - DNA, 19 bp, synthetic construct
  source 1..19: mol_type = other DNA
  modified_base 1: mod_base = OTHER; note = 2'-O-methyl 5-methylcytidine
  modified_base 2: mod_base = OTHER; note = 2'-O-methyl adenosine
  modified_base 3: mod_base = OTHER; note = 2'-O-methyl 5-methylcytidine
  modified_base 4: mod_base = OTHER; note = 2'-O-methyl thymidine
  modified_base 5: mod_base = OTHER; note = 2'-O-methyl adenosine
  modified_base 11: mod_base = OTHER; note = 2'-deoxy cytidine
  modified_base 15: mod_base = OTHER; note = 2'-O-methyl guanosine
  modified_base 16: mod_base = OTHER; note = 2'-O-methyl 5-methylcytidine
  modified_base 17: mod_base = OTHER; note = 2'-O-methyl 5-methylcytidine
  modified_base 18: mod_base = OTHER; note = 2'-O-methyl adenosine
  modified_base 19: mod_base = OTHER; note = 2'-O-methyl guanosine
  misc_feature 1..5: note = RNA
  misc_feature 6..14: note = DNA
  misc_feature 15..19: note = RNA
cactagtaaactgagccag

SEQ ID NO: 481 - DNA, 19 bp, synthetic construct
  source 1..19: mol_type = other DNA
  modified_base 1: mod_base = OTHER; note = 2'-O-methyl thymidine
  modified_base 2: mod_base = OTHER; note = 2'-O-methyl thymidine
  modified_base 3: mod_base = OTHER; note = 2'-O-methyl 5-methylcytidine
  modified_base 4: mod_base = OTHER; note = 2'-O-methyl 5-methylcytidine
  modified_base 5: mod_base = OTHER; note = 2'-O-methyl guanosine
  modified_base 6: mod_base = OTHER; note = 2'-deoxy cytidine
  modified_base 15: mod_base = OTHER; note = 2'-O-methyl thymidine
  modified_base 16: mod_base = OTHER; note = 2'-O-methyl 5-methylcytidine
  modified_base 17: mod_base = OTHER; note = 2'-O-methyl guanosine
  modified_base 18: mod_base = OTHER; note = 2'-O-methyl guanosine
  modified_base 19: mod_base = OTHER; note = 2'-O-methyl 5-methylcytidine
  misc_feature 1..5: note = RNA
  misc_feature 6..14: note = DNA
  misc_feature 15..19: note = RNA
ttccgcagtatggatcggc

SEQ ID NO: 482 - DNA, 21 bp, synthetic construct
  source 1..21: mol_type = other DNA
  modified_base 1: mod_base = OTHER; note = 2'-O-methyl adenosine
  modified_base 2: mod_base = OTHER; note = 2'-O-methyl guanosine
  modified_base 3: mod_base = OTHER; note = 2'-O-methyl adenosine
  modified_base 4: mod_base = OTHER; note = 2'-O-methyl adenosine
  modified_base 5: mod_base = OTHER; note = 2'-O-methyl adenosine
  modified_base 17: mod_base = OTHER; note = 2'-O-methyl thymidine
  modified_base 18: mod_base = OTHER; note = 2'-O-methyl 5-methylcytidine
  modified_base 19: mod_base = OTHER; note = 2'-O-methyl 5-methylcytidine
  modified_base 20: mod_base = OTHER; note = 2'-O-methyl adenosine
  modified_base 21: mod_base = OTHER; note = 2'-O-methyl 5-methylcytidine
  misc_feature 1..5: note = RNA
  misc_feature 6..16: note = DNA
  misc_feature 17..21: note = RNA
agaaaattgagagaagtccac

SEQ ID NO: 483 - DNA, 19 bp, synthetic construct
  source 1..19: mol_type = other DNA
  modified_base 1: mod_base = OTHER; note = 2'-O-methyl adenosine
  modified_base 2: mod_base = OTHER; note = 2'-O-methyl 5-methylcytidine
  modified_base 3: mod_base = OTHER; note = 2'-O-methyl 5-methylcytidine
  modified_base 4: mod_base = OTHER; note = 2'-O-methyl adenosine
  modified_base 5: mod_base = OTHER; note = 2'-O-methyl adenosine
  modified_base 12: mod_base = OTHER; note = 2'-deoxy cytidine
  modified_base 13: mod_base = OTHER; note = 2'-deoxy cytidine
  modified_base 15: mod_base = OTHER; note = 2'-O-methyl adenosine
  modified_base 16: mod_base = OTHER; note = 2'-O-methyl 5-methylcytidine
  modified_base 17: mod_base = OTHER; note = 2'-O-methyl adenosine
  modified_base 18: mod_base = OTHER; note = 2'-O-methyl guanosine
  modified_base 19: mod_base = OTHER; note = 2'-O-methyl 5-methylcytidine
  misc_feature 1..5: note = RNA
  misc_feature 6..14: note = DNA
  misc_feature 15..19: note = RNA
accaatttatgcctacagc

SEQ ID NO: 484 - DNA, 20 bp, synthetic construct
  source 1..20: mol_type = other DNA
  modified_base 1: mod_base = OTHER; note = 2'-O-methyl thymidine
  modified_base 2: mod_base = OTHER; note = 2'-O-methyl adenosine
  modified_base 3: mod_base = OTHER; note = 2'-O-methyl thymidine
  modified_base 4: mod_base = OTHER; note = 2'-O-methyl thymidine
  modified_base 5: mod_base = OTHER; note = 2'-O-methyl guanosine
  modified_base 14: mod_base = OTHER; note = 2'-deoxy cytidine
  modified_base 16: mod_base = OTHER; note = 2'-O-methyl thymidine
  modified_base 17: mod_base = OTHER; note = 2'-O-methyl guanosine
  modified_base 18: mod_base = OTHER; note = 2'-O-methyl thymidine
  modified_base 19: mod_base = OTHER; note = 2'-O-methyl 5-methylcytidine
  modified_base 20: mod_base = OTHER; note = 2'-O-methyl adenosine
  misc_feature 1..5: note = RNA
  misc_feature 6..15: note = DNA
  misc_feature 16..20: note = RNA
tattgtgaggattcttgtca

SEQ ID NO: 485 - DNA, 20 bp, synthetic construct
  source 1..20: mol_type = other DNA
  modified_base 1: mod_base = OTHER; note = 2'-O-methyl guanosine
  modified_base 2: mod_base = OTHER; note = 2'-O-methyl thymidine
  modified_base 3: mod_base = OTHER; note = 2'-O-methyl adenosine
  modified_base 4: mod_base = OTHER; note = 2'-O-methyl thymidine
  modified_base 5: mod_base = OTHER; note = 2'-O-methyl thymidine
  modified_base 15: mod_base = OTHER; note = 2'-deoxy cytidine
  modified_base 16: mod_base = OTHER; note = 2'-O-methyl thymidine
  modified_base 17: mod_base = OTHER; note = 2'-O-methyl thymidine
  modified_base 18: mod_base = OTHER; note = 2'-O-methyl guanosine
  modified_base 19: mod_base = OTHER; note = 2'-O-methyl thymidine
  modified_base 20: mod_base = OTHER; note = 2'-O-methyl 5-methylcytidine
  misc_feature 1..5: note = RNA
  misc_feature 6..15: note = DNA
  misc_feature 16..20: note = RNA
gtattgtgaggattcttgtc

SEQ ID NO: 486 - DNA, 20 bp, synthetic construct
  source 1..20: mol_type = other DNA
  modified_base 1: mod_base = OTHER; note = 2'-O-methyl 5-methylcytidine
  modified_base 2: mod_base = OTHER; note = 2'-O-methyl 5-methylcytidine
  modified_base 3: mod_base = OTHER; note = 2'-O-methyl thymidine
  modified_base 4: mod_base = OTHER; note = 2'-O-methyl thymidine
  modified_base 5: mod_base = OTHER; note = 2'-O-methyl 5-methylcytidine
  modified_base 6: mod_base = OTHER; note = 2'-deoxy cytidine
  modified_base 7: mod_base = OTHER; note = 2'-deoxy cytidine
  modified_base 16: mod_base = OTHER; note = 2'-O-methyl 5-methylcytidine
  modified_base 17: mod_base = OTHER; note = 2'-O-methyl 5-methylcytidine
  modified_base 18: mod_base = OTHER; note = 2'-O-methyl thymidine
  modified_base 19: mod_base = OTHER; note = 2'-O-methyl 5-methylcytidine
  modified_base 20: mod_base = OTHER; note = 2'-O-methyl 5-methylcytidine
  misc_feature 1..5: note = RNA
  misc_feature 6..15: note = DNA
  misc_feature 16..20: note = RNA
ccttccctgaaggttcctcc

SEQ ID NO: 487 - DNA, 20 bp, synthetic construct
  source 1..20: mol_type = other DNA
  modified_base 1: mod_base = OTHER; note = 2'-O-methyl thymidine
  modified_base 2: mod_base = OTHER; note = 2'-O-methyl thymidine
  modified_base 3: mod_base = OTHER; note = 2'-O-methyl 5-methylcytidine
  modified_base 4: mod_base = OTHER; note = 2'-O-methyl thymidine
  modified_base 5: mod_base = OTHER; note = 2'-O-methyl thymidine
  modified_base 6: mod_base = OTHER; note = 2'-deoxy cytidine
  modified_base 9: mod_base = OTHER; note = 2'-deoxy cytidine
  modified_base 16: mod_base = OTHER; note = 2'-O-methyl adenosine
  modified_base 17: mod_base = OTHER; note = 2'-O-methyl 5-methylcytidine
  modified_base 18: mod_base = OTHER; note = 2'-O-methyl 5-methylcytidine
  modified_base 19: mod_base = OTHER; note = 2'-O-methyl thymidine
  modified_base 20: mod_base = OTHER; note = 2'-O-methyl guanosine
  misc_feature 1..5: note = RNA
  misc_feature 6..15: note = DNA
  misc_feature 16..20: note = RNA
ttcttcttctaggggacctg

SEQ ID NO: 488 - DNA, 20 bp, synthetic construct
  source 1..20: mol_type = other DNA
  modified_base 1: mod_base = OTHER; note = 2'-O-methyl adenosine
  modified_base 2: mod_base = OTHER; note = 2'-O-methyl 5-methylcytidine
  modified_base 3: mod_base = OTHER; note = 2'-O-methyl adenosine
  modified_base 4: mod_base = OTHER; note = 2'-O-methyl adenosine
  modified_base 5: mod_base = OTHER; note = 2'-O-methyl adenosine
  modified_base 6: mod_base = OTHER; note = 2'-deoxy cytidine
  modified_base 10: mod_base = OTHER; note = 2'-deoxy cytidine
  modified_base 13: mod_base = OTHER; note = 2'-deoxy cytidine
  modified_base 16: mod_base = OTHER; note = 2'-O-methyl adenosine
  modified_base 17: mod_base = OTHER; note = 2'-O-methyl 5-methylcytidine
  modified_base 18: mod_base = OTHER; note = 2'-O-methyl 5-methylcytidine
  modified_base 19: mod_base = OTHER; note = 2'-O-methyl thymidine
  modified_base 20: mod_base = OTHER; note = 2'-O-methyl thymidine
  misc_feature 1..5: note = RNA
  misc_feature 6..15: note = DNA
  misc_feature 16..20: note = RNA
acaaacgggcaacatacctt

SEQ ID NO: 489 - DNA, 20 bp, synthetic construct
  source 1..20: mol_type = other DNA
  modified_base 1: mod_base = OTHER; note = 2'-O-methyl guanosine
  modified_base 2: mod_base = OTHER; note = 2'-O-methyl guanosine
  modified_base 3: mod_base = OTHER; note = 2'-O-methyl adenosine
  modified_base 4: mod_base = OTHER; note = 2'-O-methyl thymidine
  modified_base 5: mod_base = OTHER; note = 2'-O-methyl thymidine
  modified_base 6: mod_base = OTHER; note = 2'-deoxy cytidine
  modified_base 9: mod_base = OTHER; note = 2'-deoxy cytidine
  modified_base 11: mod_base = OTHER; note = 2'-deoxy cytidine
  modified_base 12: mod_base = OTHER; note = 2'-deoxy cytidine
  modified_base 15: mod_base = OTHER; note = 2'-deoxy cytidine
  modified_base 16: mod_base = OTHER; note = 2'-O-methyl guanosine
  modified_base 17: mod_base = OTHER; note = 2'-O-methyl guanosine
  modified_base 18: mod_base = OTHER; note = 2'-O-methyl guanosine
  modified_base 19: mod_base = OTHER; note = 2'-O-methyl adenosine
  modified_base 20: mod_base = OTHER; note = 2'-O-methyl 5-methylcytidine
  misc_feature 1..5: note = RNA
  misc_feature 6..15: note = DNA
  misc_feature 16..20: note = RNA
ggattcagcgccgacgggac

SEQ ID NO: 490 - DNA, 20 bp, synthetic construct
  source 1..20: mol_type = other DNA
  modified_base 1: mod_base = OTHER; note = 2'-O-methyl adenosine
  modified_base 2: mod_base = OTHER; note = 2'-O-methyl thymidine
  modified_base 3: mod_base = OTHER; note = 2'-O-methyl thymidine
  modified_base 4: mod_base = OTHER; note = 2'-O-methyl guanosine
  modified_base 5: mod_base = OTHER; note = 2'-O-methyl adenosine
  modified_base 13: mod_base = OTHER; note = 2'-deoxy cytidine
  modified_base 14: mod_base = OTHER; note = 2'-deoxy cytidine
  modified_base 16: mod_base = OTHER; note = 2'-O-methyl 5-methylcytidine
  modified_base 17: mod_base = OTHER; note = 2'-O-methyl 5-methylcytidine
  modified_base 18: mod_base = OTHER; note = 2'-O-methyl adenosine
  modified_base 19: mod_base = OTHER; note = 2'-O-methyl 5-methylcytidine
  modified_base 20: mod_base = OTHER; note = 2'-O-methyl guanosine
  misc_feature 1..5: note = RNA
  misc_feature 6..15: note = DNA
  misc_feature 16..20: note = RNA
attgagagaagtccaccacg

SEQ ID NO: 491 - DNA, 20 bp, synthetic construct
  source 1..20: mol_type = other DNA
  modified_base 1: mod_base = OTHER; note = 2'-O-methoxyethyl adenosine
  modified_base 2: mod_base = OTHER; note = 2'-O-methoxyethyl guanosine
  modified_base 3: mod_base = OTHER; note = 2'-O-methoxyethyl adenosine
  modified_base 4: mod_base = OTHER; note = 2'-O-methoxyethyl adenosine
  modified_base 5: mod_base = OTHER; note = 2'-O-methoxyethyl adenosine
  modified_base 16: mod_base = OTHER; note = 2'-O-methoxyethyl guanosine
  modified_base 17: mod_base = OTHER; note = 2'-O-methoxyethyl thymidine
  modified_base 18: mod_base = OTHER; note = 2'-O-methoxyethyl 5-methylcytidine
  modified_base 19: mod_base = OTHER; note = 2'-O-methoxyethyl 5-methylcytidine
  modified_base 20: mod_base = OTHER; note = 2'-O-methoxyethyl adenosine
  misc_feature 1..5: note = RNA
  misc_feature 6..15: note = DNA
  misc_feature 16..20: note = RNA
agaaaattgagagaagtcca

SEQ ID NO: 492 - DNA, 20 bp, synthetic construct
  source 1..20: mol_type = other DNA
  modified_base 1: mod_base = OTHER; note = 2'-O-methoxyethyl guanosine
  modified_base 2: mod_base = OTHER; note = 2'-O-methoxyethyl adenosine
  modified_base 3: mod_base = OTHER; note = 2'-O-methoxyethyl adenosine
  modified_base 4: mod_base = OTHER; note = 2'-O-methoxyethyl adenosine
  modified_base 5: mod_base = OTHER; note = 2'-O-methoxyethyl adenosine
  modified_base 16: mod_base = OTHER; note = 2'-O-methoxyethyl thymidine
  modified_base 17: mod_base = OTHER; note = 2'-O-methoxyethyl 5-methylcytidine
  modified_base 18: mod_base = OTHER; note = 2'-O-methoxyethyl 5-methylcytidine
  modified_base 19: mod_base = OTHER; note = 2'-O-methoxyethyl adenosine
  modified_base 20: mod_base = OTHER; note = 2'-O-methoxyethyl 5-methylcytidine
  misc_feature 1..5: note = RNA
  misc_feature 6..15: note = DNA
  misc_feature 16..20: note = RNA
gaaaattgagagaagtccac

SEQ ID NO: 493 - DNA, 20 bp, synthetic construct
  source 1..20: mol_type = other DNA
  modified_base 1: mod_base = OTHER; note = 2'-O-methoxyethyl adenosine
  modified_base 2: mod_base = OTHER; note = 2'-O-methoxyethyl adenosine
  modified_base 3: mod_base = OTHER; note = 2'-O-methoxyethyl adenosine
  modified_base 4: mod_base = OTHER; note = 2'-O-methoxyethyl adenosine
  modified_base 5: mod_base = OTHER; note = 2'-O-methoxyethyl thymidine
  modified_base 16: mod_base = OTHER; note = 2'-O-methoxyethyl 5-methylcytidine
  modified_base 17: mod_base = OTHER; note = 2'-O-methoxyethyl 5-methylcytidine
  modified_base 18: mod_base = OTHER; note = 2'-O-methoxyethyl adenosine
  modified_base 19: mod_base = OTHER; note = 2'-O-methoxyethyl 5-methylcytidine
  modified_base 20: mod_base = OTHER; note = 2'-O-methoxyethyl 5-methylcytidine
  misc_feature 1..5: note = RNA
  misc_feature 6..15: note = DNA
  misc_feature 16..20: note = RNA
aaaattgagagaagtccacc

SEQ ID NO: 494 - DNA, 20 bp, synthetic construct
  source 1..20: mol_type = other DNA
  modified_base 1: mod_base = OTHER; note = 2'-O-methoxyethyl adenosine
  modified_base 2: mod_base = OTHER; note = 2'-O-methoxyethyl adenosine
  modified_base 3: mod_base = OTHER; note = 2'-O-methoxyethyl adenosine
  modified_base 4: mod_base = OTHER; note = 2'-O-methoxyethyl thymidine
  modified_base 5: mod_base = OTHER; note = 2'-O-methoxyethyl thymidine
  modified_base 15: mod_base = OTHER; note = 2'-deoxy 5-methylcytidine
  modified_base 16: mod_base = OTHER; note = 2'-O-methoxyethyl 5-methylcytidine
  modified_base 17: mod_base = OTHER; note = 2'-O-methoxyethyl adenosine
  modified_base 18: mod_base = OTHER; note = 2'-O-methoxyethyl 5-methylcytidine
  modified_base 19: mod_base = OTHER; note = 2'-O-methoxyethyl 5-methylcytidine
  modified_base 20: mod_base = OTHER; note = 2'-O-methoxyethyl adenosine
  misc_feature 1..5: note = RNA
  misc_feature 6..15: note = DNA
  misc_feature 16..20: note = RNA
aaattgagagaagtccacca

SEQ ID NO: 495 - DNA, 20 bp, synthetic construct
  source 1..20: mol_type = other DNA
  modified_base 1: mod_base = OTHER; note = 2'-O-methoxyethyl adenosine
  modified_base 2: mod_base = OTHER; note = 2'-O-methoxyethyl adenosine
  modified_base 3: mod_base = OTHER; note = 2'-O-methoxyethyl thymidine
  modified_base 4: mod_base = OTHER; note = 2'-O-methoxyethyl thymidine
  modified_base 5: mod_base = OTHER; note = 2'-O-methoxyethyl guanosine
  modified_base 14: mod_base = OTHER; note = 2'-deoxy 5-methylcytidine
  modified_base 15: mod_base = OTHER; note = 2'-deoxy 5-methylcytidine
  modified_base 16: mod_base = OTHER; note = 2'-O-methoxyethyl adenosine
  modified_base 17: mod_base = OTHER; note = 2'-O-methoxyethyl 5-methylcytidine
  modified_base 18: mod_base = OTHER; note = 2'-O-methoxyethyl 5-methylcytidine
  modified_base 19: mod_base = OTHER; note = 2'-O-methoxyethyl adenosine
  modified_base 20: mod_base = OTHER; note = 2'-O-methoxyethyl 5-methylcytidine
  misc_feature 1..5: note = RNA
  misc_feature 6..15: note = DNA
  misc_feature 16..20: note = RNA
aattgagagaagtccaccac

SEQ ID NO: 496 - DNA, 20 bp, synthetic construct
  source 1..20: mol_type = other DNA
  modified_base 1: mod_base = OTHER; note = 2'-O-methoxyethyl adenosine
  modified_base 2: mod_base = OTHER; note = 2'-O-methoxyethyl thymidine
  modified_base 3: mod_base = OTHER; note = 2'-O-methoxyethyl thymidine
  modified_base 4: mod_base = OTHER; note = 2'-O-methoxyethyl guanosine
  modified_base 5: mod_base = OTHER; note = 2'-O-methoxyethyl adenosine
  modified_base 13: mod_base = OTHER; note = 2'-deoxy 5-methylcytidine
  modified_base 14: mod_base = OTHER; note = 2'-deoxy 5-methylcytidine
  modified_base 16: mod_base = OTHER; note = 2'-O-methoxyethyl 5-methylcytidine
  modified_base 17: mod_base = OTHER; note = 2'-O-methoxyethyl 5-methylcytidine
  modified_base 18: mod_base = OTHER; note = 2'-O-methoxyethyl adenosine
  modified_base 19: mod_base = OTHER; note = 2'-O-methoxyethyl 5-methylcytidine
  modified_base 20: mod_base = OTHER; note = 2'-O-methoxyethyl guanosine
  misc_feature 1..5: note = RNA
  misc_feature 6..15: note = DNA
  misc_feature 16..20: note = RNA
attgagagaagtccaccacg

SEQ ID NO: 497 - DNA, 20 bp, synthetic construct
  source 1..20: mol_type = other DNA
  modified_base 1: mod_base = OTHER; note = 2'-O-methoxyethyl 5-methylcytidine
  modified_base 2: mod_base = OTHER; note = 2'-O-methoxyethyl adenosine
  modified_base 3: mod_base = OTHER; note = 2'-O-methoxyethyl guanosine
  modified_base 4: mod_base = OTHER; note = 2'-O-methoxyethyl adenosine
  modified_base 5: mod_base = OTHER; note = 2'-O-methoxyethyl guanosine
  modified_base 12: mod_base = OTHER; note = 2'-deoxy 5-methylcytidine
  modified_base 16: mod_base = OTHER; note = 2'-O-methoxyethyl guanosine
  modified_base 17: mod_base = OTHER; note = 2'-O-methoxyethyl thymidine
  modified_base 18: mod_base = OTHER; note = 2'-O-methoxyethyl guanosine
  modified_base 19: mod_base = OTHER; note = 2'-O-methoxyethyl 5-methylcytidine
  modified_base 20: mod_base = OTHER; note = 2'-O-methoxyethyl adenosine
  misc_feature 1..5: note = RNA
  misc_feature 6..15: note = DNA
  misc_feature 16..20: note = RNA
cagaggtgaagcgaagtgca

SEQ ID NO: 498 - DNA, 20 bp, synthetic construct
  source 1..20: mol_type = other DNA
  modified_base 1: mod_base = OTHER; note = 2'-O-methoxyethyl adenosine
  modified_base 2: mod_base = OTHER; note = 2'-O-methoxyethyl guanosine
  modified_base 3: mod_base = OTHER; note = 2'-O-methoxyethyl adenosine
  modified_base 4: mod_base = OTHER; note = 2'-O-methoxyethyl guanosine
  modified_base 5: mod_base = OTHER; note = 2'-O-methoxyethyl guanosine
  modified_base 11: mod_base = OTHER; note = 2'-deoxy 5-methylcytidine
  modified_base 16: mod_base = OTHER; note = 2'-O-methoxyethyl thymidine
  modified_base 17: mod_base = OTHER; note = 2'-O-methoxyethyl guanosine
  modified_base 18: mod_base = OTHER; note = 2'-O-methoxyethyl 5-methylcytidine
  modified_base 19: mod_base = OTHER; note = 2'-O-methoxyethyl adenosine
  modified_base 20: mod_base = OTHER; note = 2'-O-methoxyethyl 5-methylcytidine
  misc_feature 1..5: note = RNA
  misc_feature 6..15: note = DNA
  misc_feature 16..20: note = RNA
agaggtgaagcgaagtgcac

SEQ ID NO: 499 - DNA, 20 bp, synthetic construct
  source 1..20: mol_type = other DNA
  modified_base 1: mod_base = OTHER; note = 2'-O-methoxyethyl guanosine
  modified_base 2: mod_base = OTHER; note = 2'-O-methoxyethyl adenosine
  modified_base 3: mod_base = OTHER; note = 2'-O-methoxyethyl guanosine
  modified_base 4: mod_base = OTHER; note = 2'-O-methoxyethyl guanosine
  modified_base 5: mod_base = OTHER; note = 2'-O-methoxyethyl thymidine
  modified_base 10: mod_base = OTHER; note = 2'-deoxy 5-methylcytidine
  modified_base 16: mod_base = OTHER; note = 2'-O-methoxyethyl guanosine
  modified_base 17: mod_base = OTHER; note = 2'-O-methoxyethyl 5-methylcytidine
  modified_base 18: mod_base = OTHER; note = 2'-O-methoxyethyl adenosine
  modified_base 19: mod_base = OTHER; note = 2'-O-methoxyethyl 5-methylcytidine
  modified_base 20: mod_base = OTHER; note = 2'-O-methoxyethyl adenosine
  misc_feature 1..5: note = RNA
  misc_feature 6..15: note = DNA
  misc_feature 16..20: note = RNA
gaggtgaagcgaagtgcaca

SEQ ID NO: 500 - DNA, 20 bp, synthetic construct
  source 1..20: mol_type = other DNA
  modified_base 1: mod_base = OTHER; note = 2'-O-methoxyethyl adenosine
  modified_base 2: mod_base = OTHER; note = 2'-O-methoxyethyl guanosine
  modified_base 3: mod_base = OTHER; note = 2'-O-methoxyethyl guanosine
  modified_base 4: mod_base = OTHER; note = 2'-O-methoxyethyl thymidine
  modified_base 5: mod_base = OTHER; note = 2'-O-methoxyethyl guanosine
  modified_base 9: mod_base = OTHER; note = 2'-deoxy 5-methylcytidine
  modified_base 16: mod_base = OTHER; note = 2'-O-methoxyethyl 5-methylcytidine
  modified_base 17: mod_base = OTHER; note = 2'-O-methoxyethyl adenosine
  modified_base 18: mod_base = OTHER; note = 2'-O-methoxyethyl 5-methylcytidine
  modified_base 19: mod_base = OTHER; note = 2'-O-methoxyethyl adenosine
  modified_base 20: mod_base = OTHER; note = 2'-O-methoxyethyl 5-methylcytidine
  misc_feature 1..5: note = RNA
  misc_feature 6..15: note = DNA
  misc_feature 16..20: note = RNA
aggtgaagcgaagtgcacac

SEQ ID NO: 501 - DNA, 20 bp, synthetic construct
  source 1..20: mol_type = other DNA
  modified_base 1: mod_base = OTHER; note = 2'-O-methoxyethyl guanosine
  modified_base 2: mod_base = OTHER; note = 2'-O-methoxyethyl guanosine
  modified_base 3: mod_base = OTHER; note = 2'-O-methoxyethyl thymidine
  modified_base 4: mod_base = OTHER; note = 2'-O-methoxyethyl guanosine
  modified_base 5: mod_base = OTHER; note = 2'-O-methoxyethyl adenosine
  modified_base 8: mod_base = OTHER; note = 2'-deoxy 5-methylcytidine
  modified_base 15: mod_base = OTHER; note = 2'-deoxy 5-methylcytidine
  modified_base 16: mod_base = OTHER; note = 2'-O-methoxyethyl adenosine
  modified_base 17: mod_base = OTHER; note = 2'-O-methoxyethyl 5-methylcytidine
  modified_base 18: mod_base = OTHER; note = 2'-O-methoxyethyl adenosine
  modified_base 19: mod_base = OTHER; note = 2'-O-methoxyethyl 5-methylcytidine
  modified_base 20: mod_base = OTHER; note = 2'-O-methoxyethyl guanosine
  misc_feature 1..5: note = RNA
  misc_feature 6..15: note = DNA
  misc_feature 16..20: note = RNA
ggtgaagcgaagtgcacacg

SEQ ID NO: 502 - DNA, 20 bp, synthetic construct
  source 1..20: mol_type = other DNA
  modified_base 1: mod_base = OTHER; note = 2'-O-methoxyethyl guanosine
  modified_base 2: mod_base = OTHER; note = 2'-O-methoxyethyl thymidine
  modified_base 3: mod_base = OTHER; note = 2'-O-methoxyethyl guanosine
  modified_base 4: mod_base = OTHER; note = 2'-O-methoxyethyl adenosine
  modified_base 5: mod_base = OTHER; note = 2'-O-methoxyethyl adenosine
  modified_base 7: mod_base = OTHER; note = 2'-deoxy 5-methylcytidine
  modified_base 14: mod_base = OTHER; note = 2'-deoxy 5-methylcytidine
  modified_base 16: mod_base = OTHER; note = 2'-O-methoxyethyl 5-methylcytidine
  modified_base 17: mod_base = OTHER; note = 2'-O-methoxyethyl adenosine
  modified_base 18: mod_base = OTHER; note = 2'-O-methoxyethyl 5-methylcytidine
  modified_base 19: mod_base = OTHER; note = 2'-O-methoxyethyl guanosine
  modified_base 20: mod_base = OTHER; note = 2'-O-methoxyethyl guanosine
  misc_feature 1..5: note = RNA
  misc_feature 6..15: note = DNA
  misc_feature 16..20: note = RNA
gtgaagcgaagtgcacacgg

SEQ ID NO: 503 - DNA, 20 bp, synthetic construct
  source 1..20: mol_type = other DNA
  modified_base 1: mod_base = OTHER; note = 2'-O-methoxyethyl guanosine
  modified_base 2: mod_base = OTHER; note = 2'-O-methoxyethyl 5-methylcytidine
  modified_base 3: mod_base = OTHER; note = 2'-O-methoxyethyl adenosine
  modified_base 4: mod_base = OTHER; note = 2'-O-methoxyethyl 5-methylcytidine
  modified_base 5: mod_base = OTHER; note = 2'-O-methoxyethyl thymidine
  modified_base 12: mod_base = OTHER; note = 2'-deoxy 5-methylcytidine
  modified_base 16: mod_base = OTHER; note = 2'-O-methoxyethyl guanosine
  modified_base 17: mod_base = OTHER; note = 2'-O-methoxyethyl 5-methylcytidine
  modified_base 18: mod_base = OTHER; note = 2'-O-methoxyethyl 5-methylcytidine
  modified_base 19: mod_base = OTHER; note = 2'-O-methoxyethyl adenosine
  modified_base 20: mod_base = OTHER; note = 2'-O-methoxyethyl guanosine
  misc_feature 1..5: note = RNA
  misc_feature 6..15: note = DNA
  misc_feature 16..20: note = RNA
gcactagtaaactgagccag

SEQ ID NO: 504 - DNA, 20 bp, synthetic construct
  source 1..20: mol_type = other DNA
  modified_base 1: mod_base = OTHER; note = 2'-O-methoxyethyl guanosine
  modified_base 2: mod_base = OTHER; note = 2'-O-methoxyethyl thymidine
  modified_base 3: mod_base = OTHER; note = 2'-O-methoxyethyl thymidine
  modified_base 4: mod_base = OTHER; note = 2'-O-methoxyethyl 5-methylcytidine
  modified_base 5: mod_base = OTHER; note = 2'-O-methoxyethyl 5-methylcytidine
  modified_base 7: mod_base = OTHER; note = 2'-deoxy 5-methylcytidine
  modified_base 16: mod_base = OTHER; note = 2'-O-methoxyethyl thymidine
  modified_base 17: mod_base = OTHER; note = 2'-O-methoxyethyl 5-methylcytidine
  modified_base 18: mod_base = OTHER; note = 2'-O-methoxyethyl guanosine
  modified_base 19: mod_base = OTHER; note = 2'-O-methoxyethyl guanosine
  modified_base 20: mod_base = OTHER; note = 2'-O-methoxyethyl 5-methylcytidine
  misc_feature 1..5: note = RNA
  misc_feature 6..15: note = DNA
  misc_feature 16..20: note = RNA
gttccgcagtatggatcggc

SEQ ID NO: 505 - DNA, 20 bp, synthetic construct
  source 1..20: mol_type = other DNA
  modified_base 1: mod_base = OTHER; note = 2'-O-methoxyethyl adenosine
  modified_base 2: mod_base = OTHER; note = 2'-O-methoxyethyl 5-methylcytidine
  modified_base 3: mod_base = OTHER; note = 2'-O-methoxyethyl 5-methylcytidine
  modified_base 4: mod_base = OTHER; note = 2'-O-methoxyethyl adenosine
  modified_base 5: mod_base = OTHER; note = 2'-O-methoxyethyl adenosine
  modified_base 12: mod_base = OTHER; note = 2'-deoxy 5-methylcytidine
  modified_base 13: mod_base = OTHER; note = 2'-deoxy 5-methylcytidine
  modified_base 16: mod_base = OTHER; note = 2'-O-methoxyethyl 5-methylcytidine
  modified_base 17: mod_base = OTHER; note = 2'-O-methoxyethyl adenosine
  modified_base 18: mod_base = OTHER; note = 2'-O-methoxyethyl guanosine
  modified_base 19: mod_base = OTHER; note = 2'-O-methoxyethyl 5-methylcytidine
  modified_base 20: mod_base = OTHER; note = 2'-O-methoxyethyl 5-methylcytidine
  misc_feature 1..5: note = RNA
  misc_feature 6..15: note = DNA
  misc_feature 16..20: note = RNA
accaatttatgcctacagcc

SEQ ID NO: 506 - DNA, 20 bp, synthetic construct
  source 1..20: mol_type = other DNA
  modified_base 1: mod_base = OTHER; note = 2'-O-methoxyethyl thymidine
  modified_base 2: mod_base = OTHER; note = 2'-O-methoxyethyl adenosine
  modified_base 3: mod_base = OTHER; note = 2'-O-methoxyethyl thymidine
  modified_base 4: mod_base = OTHER; note = 2'-O-methoxyethyl thymidine
  modified_base 5: mod_base = OTHER; note = 2'-O-methoxyethyl guanosine
  modified_base 14: mod_base = OTHER; note = 2'-deoxy 5-methylcytidine
  modified_base 16: mod_base = OTHER; note = 2'-O-methoxyethyl thymidine
  modified_base 17: mod_base = OTHER; note = 2'-O-methoxyethyl guanosine
  modified_base 18: mod_base = OTHER; note = 2'-O-methoxyethyl thymidine
  modified_base 19: mod_base = OTHER; note = 2'-O-methoxyethyl 5-methylcytidine
  modified_base 20: mod_base = OTHER; note = 2'-O-methoxyethyl adenosine
  misc_feature 1..5: note = RNA
  misc_feature 6..15: note = DNA
  misc_feature 16..20: note = RNA
tattgtgaggattcttgtca

SEQ ID NO: 507 - DNA, 30 bp, synthetic construct
  source 1..30: mol_type = other DNA
  modified_base 1: mod_base = OTHER; note = 2'-O-methoxyethyl thymidine
  modified_base 2: mod_base = OTHER; note = 2'-O-methoxyethyl guanosine
  modified_base 3: mod_base = OTHER; note = 2'-O-methoxyethyl 5-methylcytidine
  modified_base 4: mod_base = OTHER; note = 2'-O-methoxyethyl guanosine
  modified_base 5: mod_base = OTHER; note = 2'-O-methoxyethyl guanosine
  modified_base 19: mod_base = OTHER; note = 2'-deoxy 5-methylcytidine
  modified_base 24: mod_base = OTHER; note = 2'-deoxy 5-methylcytidine
  modified_base 26: mod_base = OTHER; note = 2'-O-methoxyethyl adenosine
  modified_base 27: mod_base = OTHER; note = 2'-O-methoxyethyl 5-methylcytidine
  modified_base 28: mod_base = OTHER; note = 2'-O-methoxyethyl adenosine
  modified_base 29: mod_base = OTHER; note = 2'-O-methoxyethyl adenosine
  modified_base 30: mod_base = OTHER; note = 2'-O-methoxyethyl guanosine
  misc_feature 1..5: note = RNA
  misc_feature 6..25: note = DNA
  misc_feature 26..30: note = RNA
tgcggtattgtgaggattcttgtcaacaag

SEQ ID NO: 508 - DNA, 16 bp, synthetic construct
  source 1..16: mol_type = other DNA
  modified_base 1: mod_base = OTHER; note = 2'-O-methoxyethyl adenosine
  modified_base 2: mod_base = OTHER; note = 2'-O-methoxyethyl guanosine
  modified_base 3: mod_base = OTHER; note = 2'-O-methoxyethyl 5-methylcytidine
  modified_base 10: mod_base = OTHER; note = 2'-deoxy 5-methylcytidine
  modified_base 12: mod_base = OTHER; note = 2'-deoxy 5-methylcytidine
  modified_base 14: mod_base = OTHER; note = 2'-O-methoxyethyl 5-methylcytidine
  modified_base 15: mod_base = OTHER; note = 2'-O-methoxyethyl guanosine
  modified_base 16: mod_base = OTHER; note = 2'-O-methoxyethyl guanosine
  misc_feature 1..3: note = RNA
  misc_feature 4..13: note = DNA
  misc_feature 14..16: note = RNA
agcgaagtgcacacgg

SEQ ID NO: 509 - DNA, 20 bp, synthetic construct
  source 1..20: mol_type = other DNA
  modified_base 1: mod_base = OTHER; note = 2'-O-methoxyethyl 5-methylcytidine
  modified_base 2: mod_base = OTHER; note = 2'-O-methoxyethyl 5-methylcytidine
  modified_base 3: mod_base = OTHER; note = 2'-O-methoxyethyl thymidine
  modified_base 4: mod_base = OTHER; note = 2'-O-methoxyethyl thymidine
  modified_base 5: mod_base = OTHER; note = 2'-O-methoxyethyl 5-methylcytidine
  modified_base 6: mod_base = OTHER; note = 2'-deoxy 5-methylcytidine
  modified_base 7: mod_base = OTHER; note = 2'-deoxy 5-methylcytidine
  modified_base 16: mod_base = OTHER; note = 2'-O-methoxyethyl 5-methylcytidine
  modified_base 17: mod_base = OTHER; note = 2'-O-methoxyethyl 5-methylcytidine
  modified_base 18: mod_base = OTHER; note = 2'-O-methoxyethyl thymidine
  modified_base 19: mod_base = OTHER; note = 2'-O-methoxyethyl 5-methylcytidine
  modified_base 20: mod_base = OTHER; note = 2'-O-methoxyethyl 5-methylcytidine
  misc_feature 1..5: note = RNA
  misc_feature 6..15: note = DNA
  misc_feature 16..20: note = RNA
ccttccctgaaggttcctcc

SEQ ID NO: 510 - DNA, 20 bp, synthetic construct
  source 1..20: mol_type = other DNA
  modified_base 1: mod_base = OTHER; note = 2'-O-methoxyethyl thymidine
  modified_base 2: mod_base = OTHER; note = 2'-O-methoxyethyl thymidine
  modified_base 3: mod_base = OTHER; note = 2'-O-methoxyethyl 5-methylcytidine
  modified_base 4: mod_base = OTHER; note = 2'-O-methoxyethyl thymidine
  modified_base 5: mod_base = OTHER; note = 2'-O-methoxyethyl thymidine
  modified_base 6: mod_base = OTHER; note = 2'-deoxy 5-methylcytidine
  modified_base 9: mod_base = OTHER; note = 2'-deoxy 5-methylcytidine
  modified_base 16: mod_base = OTHER; note = 2'-O-methoxyethyl adenosine
  modified_base 17: mod_base = OTHER; note = 2'-O-methoxyethyl 5-methylcytidine
  modified_base 18: mod_base = OTHER; note = 2'-O-methoxyethyl 5-methylcytidine
  modified_base 19: mod_base = OTHER; note = 2'-O-methoxyethyl thymidine
  modified_base 20: mod_base = OTHER; note = 2'-O-methoxyethyl guanosine
  misc_feature 1..5: note = RNA
  misc_feature 6..15: note = DNA
  misc_feature 16..20: note = RNA
ttcttcttctaggggacctg

SEQ ID NO: 511 - DNA, 20 bp, synthetic construct
  source 1..20: mol_type = other DNA
  modified_base 1: mod_base = OTHER; note = 2'-O-methoxyethyl adenosine
  modified_base 2: mod_base = OTHER; note = 2'-O-methoxyethyl 5-methylcytidine
  modified_base 3: mod_base = OTHER; note = 2'-O-methoxyethyl adenosine
  modified_base 4: mod_base = OTHER; note = 2'-O-methoxyethyl adenosine
  modified_base 5: mod_base = OTHER; note = 2'-O-methoxyethyl adenosine
  modified_base 6: mod_base = OTHER; note = 2'-deoxy 5-methylcytidine
  modified_base 10: mod_base = OTHER; note = 2'-deoxy 5-methylcytidine
  modified_base 13: mod_base = OTHER; note = 2'-deoxy 5-methylcytidine
  modified_base 16: mod_base = OTHER; note = 2'-O-methoxyethyl adenosine
  modified_base 17: mod_base = OTHER; note = 2'-O-methoxyethyl 5-methylcytidine
  modified_base 18: mod_base = OTHER; note = 2'-O-methoxyethyl 5-methylcytidine
  modified_base 19: mod_base = OTHER; note = 2'-O-methoxyethyl thymidine
  modified_base 20: mod_base = OTHER; note = 2'-O-methoxyethyl thymidine
  misc_feature 1..5: note = RNA
  misc_feature 6..15: note = DNA
  misc_feature 16..20: note = RNA
acaaacgggcaacatacctt

SEQ ID NO: 512 - DNA, 20 bp, synthetic construct
  source 1..20: mol_type = other DNA
  modified_base 1: mod_base = OTHER; note = 2'-O-methoxyethyl guanosine
  modified_base 2: mod_base = OTHER; note = 2'-O-methoxyethyl thymidine
  modified_base 3: mod_base = OTHER; note = 2'-O-methoxyethyl guanosine
  modified_base 4: mod_base = OTHER; note = 2'-O-methoxyethyl adenosine
  modified_base 5: mod_base = OTHER; note = 2'-O-methoxyethyl adenosine
  modified_base 7: mod_base = OTHER; note = 2'-deoxy 5-methylcytidine
  modified_base 14: mod_base = OTHER; note = 2'-deoxy 5-methylcytidine
  modified_base 16: mod_base = OTHER; note = 2'-O-methoxyethyl 5-methylcytidine
  modified_base 17: mod_base = OTHER; note = 2'-O-methoxyethyl 5-methylcytidine
  modified_base 18: mod_base = OTHER; note = 2'-O-methoxyethyl adenosine
  modified_base 19: mod_base = OTHER; note = 2'-O-methoxyethyl adenosine
  modified_base 20: mod_base = OTHER; note = 2'-O-methoxyethyl 5-methylcytidine
  misc_feature 1..5: note = RNA
  misc_feature 6..15: note = DNA
  misc_feature 16..20: note = RNA
gtgaagcgaagtgcaccaac

SEQ ID NO: 513 - DNA, 20 bp, synthetic construct
  source 1..20: mol_type = other DNA
  modified_base 1: mod_base = OTHER; note = 2'-O-methoxyethyl 5-methylcytidine
  modified_base 2: mod_base = OTHER; note = 2'-O-methoxyethyl adenosine
  modified_base 3: mod_base = OTHER; note = 2'-O-methoxyethyl adenosine
  modified_base 4: mod_base = OTHER; note = 2'-O-methoxyethyl 5-methylcytidine
  modified_base 5: mod_base = OTHER; note = 2'-O-methoxyethyl adenosine
  modified_base 7: mod_base = OTHER; note = 2'-deoxy 5-methylcytidine
  modified_base 14: mod_base = OTHER; note = 2'-deoxy 5-methylcytidine
  modified_base 16: mod_base = OTHER; note = 2'-O-methoxyethyl 5-methylcytidine
  modified_base 17: mod_base = OTHER; note = 2'-O-methoxyethyl adenosine
  modified_base 18: mod_base = OTHER; note = 2'-O-methoxyethyl 5-methylcytidine
  modified_base 19: mod_base = OTHER; note = 2'-O-methoxyethyl guanosine
  modified_base 20: mod_base = OTHER; note = 2'-O-methoxyethyl guanosine
  misc_feature 1..5: note = RNA
  misc_feature 6..15: note = DNA
  misc_feature 16..20: note = RNA
caacagcgaagtgcacacgg

SEQ ID NO: 514 - DNA, 20 bp, synthetic construct
  source 1..20: mol_type = other DNA
  modified_base 1: mod_base = OTHER; note = 2'-O-methoxyethyl 5-methylcytidine
  modified_base 2: mod_base = OTHER; note = 2'-O-methoxyethyl thymidine
  modified_base 3: mod_base = OTHER; note = 2'-O-methoxyethyl guanosine
  modified_base 4: mod_base = OTHER; note = 2'-O-methoxyethyl 5-methylcytidine
  modified_base 5: mod_base = OTHER; note = 2'-O-methoxyethyl guanosine
  modified_base 16: mod_base = OTHER; note = 2'-O-methoxyethyl guanosine
  modified_base 17: mod_base = OTHER; note = 2'-O-methoxyethyl adenosine
  modified_base 18: mod_base = OTHER; note = 2'-O-methoxyethyl thymidine
  modified_base 19: mod_base = OTHER; note = 2'-O-methoxyethyl thymidine
  modified_base 20: mod_base = OTHER; note = 2'-O-methoxyethyl 5-methylcytidine
  misc_feature 1..5: note = RNA
  misc_feature 6..15: note = DNA
  misc_feature 16..20: note = RNA
ctgcggtattgtgaggattc

SEQ ID NO: 515 - DNA, 20 bp, synthetic construct
  source 1..20: mol_type = other DNA
  modified_base 1: mod_base = OTHER; note = 2'-O-methoxyethyl guanosine
  modified_base 2: mod_base = OTHER; note = 2'-O-methoxyethyl 5-methylcytidine
  modified_base 3: mod_base = OTHER; note = 2'-O-methoxyethyl guanosine
  modified_base 4: mod_base = OTHER; note = 2'-O-methoxyethyl guanosine
  modified_base 5: mod_base = OTHER; note = 2'-O-methoxyethyl thymidine
  modified_base 16: mod_base = OTHER; note = 2'-O-methoxyethyl thymidine
  modified_base 17: mod_base = OTHER; note = 2'-O-methoxyethyl thymidine
  modified_base 18: mod_base = OTHER; note = 2'-O-methoxyethyl 5-methylcytidine
  modified_base 19: mod_base = OTHER; note = 2'-O-methoxyethyl thymidine
  modified_base 20: mod_base = OTHER; note = 2'-O-methoxyethyl thymidine
  misc_feature 1..5: note = RNA
  misc_feature 6..15: note = DNA
  misc_feature 16..20: note = RNA
gcggtattgtgaggattctt

SEQ ID NO: 516 - DNA, 20 bp, synthetic construct
  source 1..20: mol_type = other DNA
  modified_base 1: mod_base = OTHER; note = 2'-O-methoxyethyl guanosine
  modified_base 2: mod_base = OTHER; note = 2'-O-methoxyethyl guanosine
  modified_base 3: mod_base = OTHER; note = 2'-O-methoxyethyl thymidine
  modified_base 4: mod_base = OTHER; note = 2'-O-methoxyethyl adenosine
  modified_base 5: mod_base = OTHER; note = 2'-O-methoxyethyl thymidine
  modified_base 16: mod_base = OTHER; note = 2'-O-methoxyethyl 5-methylcytidine
  modified_base 17: mod_base = OTHER; note = 2'-O-methoxyethyl thymidine
  modified_base 18: mod_base = OTHER; note = 2'-O-methoxyethyl thymidine
  modified_base 19: mod_base = OTHER; note = 2'-O-methoxyethyl guanosine
  modified_base 20: mod_base = OTHER; note = 2'-O-methoxyethyl thymidine
  misc_feature 1..5: note = RNA
  misc_feature 6..15: note = DNA
  misc_feature 16..20: note = RNA
ggtattgtgaggattcttgt

SEQ ID NO: 517 - DNA, 20 bp, synthetic construct
  source 1..20: mol_type = other DNA
  modified_base 1: mod_base = OTHER; note = 2'-O-methoxyethyl thymidine
  modified_base 2: mod_base = OTHER; note = 2'-O-methoxyethyl adenosine
  modified_base 3: mod_base = OTHER; note = 2'-O-methoxyethyl thymidine
  modified_base 4: mod_base = OTHER; note = 2'-O-methoxyethyl thymidine
  modified_base 5: mod_base = OTHER; note = 2'-O-methoxyethyl guanosine
  modified_base 14: mod_base = OTHER; note = 2'-deoxy 5-methylcytidine
  modified_base 16: mod_base = OTHER; note = 2'-O-methoxyethyl thymidine
  modified_base 17: mod_base = OTHER; note = 2'-O-methoxyethyl guanosine
  modified_base 18: mod_base = OTHER; note = 2'-O-methoxyethyl thymidine
  modified_base 19: mod_base = OTHER; note = 2'-O-methoxyethyl 5-methylcytidine
  modified_base 20: mod_base = OTHER; note = 2'-O-methoxyethyl adenosine
  misc_feature 1..5: note = RNA
  misc_feature 6..15: note = DNA
  misc_feature 16..20: note = RNA
tattgtgaggattcttgtca

SEQ ID NO: 518 - DNA, 20 bp, synthetic construct
  source 1..20: mol_type = other DNA
  modified_base 1: mod_base = OTHER; note = 2'-O-methoxyethyl thymidine
  modified_base 2: mod_base = OTHER; note = 2'-O-methoxyethyl thymidine
  modified_base 3: mod_base = OTHER; note = 2'-O-methoxyethyl guanosine
  modified_base 4: mod_base = OTHER; note = 2'-O-methoxyethyl thymidine
  modified_base 5: mod_base = OTHER; note = 2'-O-methoxyethyl guanosine
  modified_base 12: mod_base = OTHER; note = 2'-deoxy 5-methylcytidine
  modified_base 16: mod_base = OTHER; note = 2'-O-methoxyethyl thymidine
  modified_base 17: mod_base = OTHER; note = 2'-O-methoxyethyl 5-methylcytidine
  modified_base 18: mod_base = OTHER; note = 2'-O-methoxyethyl adenosine
  modified_base 19: mod_base = OTHER; note = 2'-O-methoxyethyl adenosine
  modified_base 20: mod_base = OTHER; note = 2'-O-methoxyethyl 5-methylcytidine
  misc_feature 1..5: note = RNA
  misc_feature 6..15: note = DNA
  misc_feature 16..20: note = RNA
ttgtgaggattcttgtcaac

SEQ ID NO: 519 - DNA, 20 bp, synthetic construct
  source 1..20: mol_type = other DNA
  modified_base 1: mod_base = OTHER; note = 2'-O-methoxyethyl guanosine
  modified_base 2: mod_base = OTHER; note = 2'-O-methoxyethyl thymidine
  modified_base 3: mod_base = OTHER; note = 2'-O-methoxyethyl guanosine
  modified_base 4: mod_base = OTHER; note = 2'-O-methoxyethyl adenosine
  modified_base 5: mod_base = OTHER; note = 2'-O-methoxyethyl guanosine
  modified_base 10: mod_base = OTHER; note = 2'-deoxy 5-methylcytidine
  modified_base 15: mod_base = OTHER; note = 2'-deoxy 5-methylcytidine
  modified_base 16: mod_base = OTHER; note = 2'-O-methoxyethyl adenosine
  modified_base 17: mod_base = OTHER; note = 2'-O-methoxyethyl adenosine
  modified_base 18: mod_base = OTHER; note = 2'-O-methoxyethyl 5-methylcytidine
  modified_base 19: mod_base = OTHER; note = 2'-O-methoxyethyl adenosine
  modified_base 20: mod_base = OTHER; note = 2'-O-methoxyethyl adenosine
  misc_feature 1..5: note = RNA
  misc_feature 6..15: note = DNA
  misc_feature 16..20: note = RNA
gtgaggattcttgtcaacaa

SEQ ID NO: 520 - DNA, 20 bp, synthetic construct
  source 1..20: mol_type = other DNA
  modified_base 1: mod_base = OTHER; note = 2'-O-methoxyethyl guanosine
  modified_base 2: mod_base = OTHER; note = 2'-O-methoxyethyl adenosine
  modified_base 3: mod_base = OTHER; note = 2'-O-methoxyethyl guanosine
  modified_base 4: mod_base = OTHER; note = 2'-O-methoxyethyl guanosine
  modified_base 5: mod_base = OTHER; note = 2'-O-methoxyethyl adenosine
  modified_base 8: mod_base = OTHER; note = 2'-deoxy 5-methylcytidine
  modified_base 13: mod_base = OTHER; note = 2'-deoxy 5-methylcytidine
  modified_base 16: mod_base = OTHER; note = 2'-O-methoxyethyl 5-methylcytidine
  modified_base 17: mod_base = OTHER; note = 2'-O-methoxyethyl adenosine
  modified_base 18: mod_base = OTHER; note = 2'-O-methoxyethyl adenosine
  modified_base 19: mod_base = OTHER; note = 2'-O-methoxyethyl guanosine
  modified_base 20: mod_base = OTHER; note = 2'-O-methoxyethyl adenosine
  misc_feature 1..5: note = RNA
  misc_feature 6..15: note = DNA
  misc_feature 16..20: note = RNA
gaggattcttgtcaacaaga

SEQ ID NO: 521 - DNA, 20 bp, synthetic construct
  source 1..20: mol_type = other DNA
  modified_base 1: mod_base = OTHER; note = 2'-O-methoxyethyl adenosine
  modified_base 2: mod_base = OTHER; note = 2'-O-methoxyethyl adenosine
  modified_base 3: mod_base = OTHER; note = 2'-O-methoxyethyl adenosine
  modified_base 4: mod_base = OTHER; note = 2'-O-methoxyethyl thymidine
  modified_base 5: mod_base = OTHER; note = 2'-O-methoxyethyl guanosine
  modified_base 7: mod_base = OTHER; note = 2'-deoxy 5-methylcytidine
  modified_base 9: mod_base = OTHER; note = 2'-deoxy 5-methylcytidine
  modified_base 16: mod_base = OTHER; note = 2'-O-methoxyethyl adenosine
  modified_base 17: mod_base = OTHER; note = 2'-O-methoxyethyl 5-methylcytidine
  modified_base 18: mod_base = OTHER; note = 2'-O-methoxyethyl thymidine
  modified_base 19: mod_base = OTHER; note = 2'-O-methoxyethyl guanosine
  modified_base 20: mod_base = OTHER; note = 2'-O-methoxyethyl adenosine
  misc_feature 1..5: note = RNA
  misc_feature 6..15: note = DNA
  misc_feature 16..20: note = RNA
aaatggcactagtaaactga

SEQ ID NO: 522 - DNA, 20 bp, synthetic construct
  source 1..20: mol_type = other DNA
  modified_base 1: mod_base = OTHER; note = 2'-O-methoxyethyl adenosine
  modified_base 2: mod_base = OTHER; note = 2'-O-methoxyethyl thymidine
  modified_base 3: mod_base = OTHER; note = 2'-O-methoxyethyl guanosine
  modified_base 4: mod_base = OTHER; note = 2'-O-methoxyethyl guanosine
  modified_base 5: mod_base = OTHER; note = 2'-O-methoxyethyl 5-methylcytidine
  modified_base 7: mod_base = OTHER; note = 2'-deoxy 5-methylcytidine
  modified_base 15: mod_base = OTHER; note = 2'-deoxy 5-methylcytidine
  modified_base 16: mod_base = OTHER; note = 2'-O-methoxyethyl thymidine
  modified_base 17: mod_base = OTHER; note = 2'-O-methoxyethyl guanosine
  modified_base 18: mod_base = OTHER; note = 2'-O-methoxyethyl adenosine
  modified_base 19: mod_base = OTHER; note = 2'-O-methoxyethyl guanosine
  modified_base 20: mod_base = OTHER; note = 2'-O-methoxyethyl 5-methylcytidine
  misc_feature 1..5: note = RNA
  misc_feature 6..15: note = DNA
  misc_feature 16..20: note = RNA
atggcactagtaaactgagc

SEQ ID NO: 523 - DNA, 20 bp, synthetic construct
  source 1..20: mol_type = other DNA
  modified_base 1: mod_base = OTHER; note = 2'-O-methoxyethyl guanosine
  modified_base 2: mod_base = OTHER; note = 2'-O-methoxyethyl guanosine
  modified_base 3: mod_base = OTHER; note = 2'-O-methoxyethyl 5-methylcytidine
  modified_base 4: mod_base = OTHER; note = 2'-O-methoxyethyl adenosine
  modified_base 5: mod_base = OTHER; note = 2'-O-methoxyethyl 5-methylcytidine
  modified_base 13: mod_base = OTHER; note = 2'-deoxy 5-methylcytidine
  modified_base 16: mod_base = OTHER; note = 2'-O-methoxyethyl adenosine
  modified_base 17: mod_base = OTHER; note = 2'-O-methoxyethyl guanosine
  modified_base 18: mod_base = OTHER; note = 2'-O-methoxyethyl 5-methylcytidine
  modified_base 19: mod_base = OTHER; note = 2'-O-methoxyethyl 5-methylcytidine
  modified_base 20: mod_base = OTHER; note = 2'-O-methoxyethyl adenosine
  misc_feature 1..5: note = RNA
  misc_feature 6..15: note = DNA
  misc_feature 16..20: note = RNA
ggcactagtaaactgagcca

SEQ ID NO: 524 - DNA, 20 bp, synthetic construct
  source 1..20: mol_type = other DNA
  modified_base 1: mod_base = OTHER; note = 2'-O-methoxyethyl 5-methylcytidine
  modified_base 2: mod_base = OTHER; note = 2'-O-methoxyethyl adenosine
  modified_base 3: mod_base = OTHER; note = 2'-O-methoxyethyl 5-methylcytidine
  modified_base 4: mod_base = OTHER; note = 2'-O-methoxyethyl thymidine
  modified_base 5: mod_base = OTHER; note = 2'-O-methoxyethyl adenosine
  modified_base 11: mod_base = OTHER; note = 2'-deoxy 5-methylcytidine
  modified_base 16: mod_base = OTHER; note = 2'-O-methoxyethyl 5-methylcytidine
  modified_base 17: mod_base = OTHER; note = 2'-O-methoxyethyl 5-methylcytidine
  modified_base 18: mod_base = OTHER; note = 2'-O-methoxyethyl adenosine
  modified_base 19: mod_base = OTHER; note = 2'-O-methoxyethyl guanosine
  modified_base 20: mod_base = OTHER; note = 2'-O-methoxyethyl guanosine
  misc_feature 1..5: note = RNA
  misc_feature 6..15: note = DNA
  misc_feature 16..20: note = RNA
cactagtaaactgagccagg

SEQ ID NO: 525 - DNA, 20 bp, synthetic construct
  source 1..20: mol_type = other DNA
  modified_base 1: mod_base = OTHER; note = 2'-O-methoxyethyl 5-methylcytidine
  modified_base 2: mod_base = OTHER; note = 2'-O-methoxyethyl thymidine
  modified_base 3: mod_base = OTHER; note = 2'-O-methoxyethyl adenosine
  modified_base 4: mod_base = OTHER; note = 2'-O-methoxyethyl guanosine
  modified_base 5: mod_base = OTHER; note = 2'-O-methoxyethyl thymidine
  modified_base 9: mod_base = OTHER; note = 2'-deoxy 5-methylcytidine
  modified_base 14: mod_base = OTHER; note = 2'-deoxy 5-methylcytidine
  modified_base 15: mod_base = OTHER; note = 2'-deoxy 5-methylcytidine
  modified_base 16: mod_base = OTHER; note = 2'-O-methoxyethyl adenosine
  modified_base 17: mod_base = OTHER; note = 2'-O-methoxyethyl guanosine
  modified_base 18: mod_base = OTHER; note = 2'-O-methoxyethyl guanosine
  modified_base 19: mod_base = OTHER; note = 2'-O-methoxyethyl adenosine
  modified_base 20: mod_base = OTHER; note = 2'-O-methoxyethyl guanosine
  misc_feature 1..5: note = RNA
  misc_feature 6..15: note = DNA
  misc_feature 16..20: note = RNA
ctagtaaactgagccaggag

SEQ ID NO: 526 - DNA, 20 bp, synthetic construct
  source 1..20: mol_type = other DNA
  modified_base 1: mod_base = OTHER; note = 2'-O-methoxyethyl adenosine
  modified_base 2: mod_base = OTHER; note = 2'-O-methoxyethyl guanosine
  modified_base 3: mod_base = OTHER; note = 2'-O-methoxyethyl thymidine
  modified_base 4: mod_base = OTHER; note = 2'-O-methoxyethyl adenosine
  modified_base 5: mod_base = OTHER; note = 2'-O-methoxyethyl adenosine
  modified_base 7: mod_base = OTHER; note = 2'-deoxy 5-methylcytidine
  modified_base 12: mod_base = OTHER; note = 2'-deoxy 5-methylcytidine
  modified_base 13: mod_base = OTHER; note = 2'-deoxy 5-methylcytidine
  modified_base 16: mod_base = OTHER; note = 2'-O-methoxyethyl guanosine
  modified_base 17: mod_base = OTHER; note = 2'-O-methoxyethyl adenosine
  modified_base 18: mod_base = OTHER; note = 2'-O-methoxyethyl guanosine
  modified_base 19: mod_base = OTHER; note = 2'-O-methoxyethyl adenosine
  modified_base 20: mod_base = OTHER; note = 2'-O-methoxyethyl adenosine
  misc_feature 1..5: note = RNA
  misc_feature 6..15: note = DNA
  misc_feature 16..20: note = RNA
agtaaactgagccaggagaa

SEQ ID NO: 527 - DNA, 20 bp, synthetic construct
  source 1..20: mol_type = other DNA
  modified_base 1: mod_base = OTHER; note = 2'-O-methoxyethyl thymidine
  modified_base 2: mod_base = OTHER; note = 2'-O-methoxyethyl adenosine
  modified_base 3: mod_base = OTHER; note = 2'-O-methoxyethyl guanosine
  modified_base 4: mod_base = OTHER; note = 2'-O-methoxyethyl guanosine
  modified_base 5: mod_base = OTHER; note = 2'-O-methoxyethyl adenosine
  modified_base 9: mod_base = OTHER; note = 2'-deoxy 5-methylcytidine
  modified_base 10: mod_base = OTHER; note = 2'-deoxy 5-methylcytidine
  modified_base 12: mod_base = OTHER; note = 2'-deoxy 5-methylcytidine
  modified_base 16: mod_base = OTHER; note = 2'-O-methoxyethyl adenosine
  modified_base 17: mod_base = OTHER; note = 2'-O-methoxyethyl thymidine
  modified_base 18: mod_base = OTHER; note = 2'-O-methoxyethyl guanosine
  modified_base 19: mod_base = OTHER; note = 2'-O-methoxyethyl guanosine
  modified_base 20: mod_base = OTHER; note = 2'-O-methoxyethyl adenosine
  misc_feature 1..5: note = RNA
  misc_feature 6..15: note = DNA
  misc_feature 16..20: note = RNA
taggagttccgcagtatgga

SEQ ID NO: 528 - DNA, 20 bp, synthetic construct
  source 1..20: mol_type = other DNA
  modified_base 1: mod_base = OTHER; note = 2'-O-methoxyethyl guanosine
  modified_base 2: mod_base = OTHER; note = 2'-O-methoxyethyl guanosine
  modified_base 3: mod_base = OTHER; note = 2'-O-methoxyethyl adenosine
  modified_base 4: mod_base = OTHER; note = 2'-O-methoxyethyl guanosine
  modified_base 5: mod_base = OTHER; note = 2'-O-methoxyethyl thymidine
  modified_base 7: mod_base = OTHER; note = 2'-deoxy 5-methylcytidine
  modified_base 8: mod_base = OTHER; note = 2'-deoxy 5-methylcytidine
  modified_base 10: mod_base = OTHER; note = 2'-deoxy 5-methylcytidine
  modified_base 16: mod_base = OTHER; note = 2'-O-methoxyethyl guanosine
  modified_base 17: mod_base = OTHER; note = 2'-O-methoxyethyl guanosine
  modified_base 18: mod_base = OTHER; note = 2'-O-methoxyethyl adenosine
  modified_base 19: mod_base = OTHER; note = 2'-O-methoxyethyl thymidine
  modified_base 20: mod_base = OTHER; note = 2'-O-methoxyethyl 5-methylcytidine
  misc_feature 1..5: note = RNA
  misc_feature 6..15: note = DNA
  misc_feature 16..20: note = RNA
ggagttccgcagtatggatc

SEQ ID NO: 529 - DNA, 20 bp, synthetic construct
  source 1..20: mol_type = other DNA
  modified_base 1: mod_base = OTHER; note = 2'-O-methoxyethyl adenosine
  modified_base 2: mod_base = OTHER; note = 2'-O-methoxyethyl guanosine
  modified_base 3: mod_base = OTHER; note = 2'-O-methoxyethyl thymidine
  modified_base 4: mod_base = OTHER; note = 2'-O-methoxyethyl thymidine
  modified_base 5: mod_base = OTHER; note = 2'-O-methoxyethyl 5-methylcytidine
  modified_base 6: mod_base = OTHER; note = 2'-deoxy 5-methylcytidine
  modified_base 8: mod_base = OTHER; note = 2'-deoxy 5-methylcytidine
  modified_base 16: mod_base = OTHER; note = 2'-O-methoxyethyl adenosine
  modified_base 17: mod_base = OTHER; note = 2'-O-methoxyethyl thymidine
  modified_base 18: mod_base = OTHER; note = 2'-O-methoxyethyl 5-methylcytidine
  modified_base 19: mod_base = OTHER; note = 2'-O-methoxyethyl guanosine
  modified_base 20: mod_base = OTHER; note = 2'-O-methoxyethyl guanosine
  misc_feature 1..5: note = RNA
  misc_feature 6..15: note = DNA
  misc_feature 16..20: note = RNA
agttccgcagtatggatcgg

SEQ ID NO: 530 - DNA, 20 bp, synthetic construct
  source 1..20: mol_type = other DNA
  modified_base 1: mod_base = OTHER; note = 2'-O-methoxyethyl thymidine
  modified_base 2: mod_base = OTHER; note = 2'-O-methoxyethyl thymidine
  modified_base 3: mod_base = OTHER; note = 2'-O-methoxyethyl 5-methylcytidine
  modified_base 4: mod_base = OTHER; note = 2'-O-methoxyethyl 5-methylcytidine
  modified_base 5: mod_base = OTHER; note = 2'-O-methoxyethyl guanosine
  modified_base 6: mod_base = OTHER; note = 2'-deoxy 5-methylcytidine
  modified_base 16: mod_base = OTHER; note = 2'-O-methoxyethyl 5-methylcytidine
  modified_base 17: mod_base = OTHER; note = 2'-O-methoxyethyl guanosine
  modified_base 18: mod_base = OTHER; note = 2'-O-methoxyethyl guanosine
  modified_base 19: mod_base = OTHER; note = 2'-O-methoxyethyl 5-methylcytidine
  modified_base 20: mod_base = OTHER; note = 2'-O-methoxyethyl adenosine
  misc_feature 1..5: note = RNA
  misc_feature 6..15: note = DNA
  misc_feature 16..20: note = RNA
ttccgcagtatggatcggca

SEQ ID NO: 531 - DNA, 20 bp, synthetic construct
  source 1..20: mol_type = other DNA
  modified_base 1: mod_base = OTHER; note = 2'-O-methoxyethyl 5-methylcytidine
  modified_base 2: mod_base = OTHER; note = 2'-O-methoxyethyl 5-methylcytidine
  modified_base 3: mod_base = OTHER; note = 2'-O-methoxyethyl guanosine
  modified_base 4: mod_base = OTHER; note = 2'-O-methoxyethyl 5-methylcytidine
  modified_base 5: mod_base = OTHER; note = 2'-O-methoxyethyl adenosine
  modified_base 14: mod_base = OTHER; note = 2'-deoxy 5-methylcytidine
  modified_base 16: mod_base = OTHER; note = 2'-O-methoxyethyl guanosine
  modified_base 17: mod_base = OTHER; note = 2'-O-methoxyethyl 5-methylcytidine
  modified_base 18: mod_base = OTHER; note = 2'-O-methoxyethyl adenosine
  modified_base 19: mod_base = OTHER; note = 2'-O-methoxyethyl guanosine
  modified_base 20: mod_base = OTHER; note = 2'-O-methoxyethyl adenosine
  misc_feature 1..5: note = RNA
  misc_feature 6..15: note = DNA
  misc_feature 16..20: note = RNA
ccgcagtatggatcggcaga

SEQ ID NO: 532 - DNA, 20 bp, synthetic construct
  source 1..20: mol_type = other DNA
  modified_base 1: mod_base = OTHER; note = 2'-O-methoxyethyl guanosine
  modified_base 2: mod_base = OTHER; note = 2'-O-methoxyethyl 5-methylcytidine
  modified_base 3: mod_base = OTHER; note = 2'-O-methoxyethyl adenosine
  modified_base 4: mod_base = OTHER; note = 2'-O-methoxyethyl guanosine
  modified_base 5: mod_base = OTHER; note = 2'-O-methoxyethyl thymidine
  modified_base 12: mod_base = OTHER; note = 2'-deoxy 5-methylcytidine
  modified_base 15: mod_base = OTHER; note = 2'-deoxy 5-methylcytidine
  modified_base 16: mod_base = OTHER; note = 2'-O-methoxyethyl adenosine
  modified_base 17: mod_base = OTHER; note = 2'-O-methoxyethyl guanosine
  modified_base 18: mod_base = OTHER; note = 2'-O-methoxyethyl adenosine
  modified_base 19: mod_base = OTHER; note = 2'-O-methoxyethyl guanosine
  modified_base 20: mod_base = OTHER; note = 2'-O-methoxyethyl guanosine
  misc_feature 1..5: note = RNA
  misc_feature 6..15: note = DNA
  misc_feature 16..20: note = RNA
gcagtatggatcggcagagg

SEQ ID NO: 533 - DNA, 30 bp, synthetic construct
  source 1..30: mol_type = other DNA
  modified_base 1: mod_base = OTHER; note = 2'-O-methoxyethyl adenosine
  modified_base 2: mod_base = OTHER; note = 2'-O-methoxyethyl adenosine
  modified_base 3: mod_base = OTHER; note = 2'-O-methoxyethyl adenosine
  modified_base 4: mod_base = OTHER; note = 2'-O-methoxyethyl uridine
  modified_base 5: mod_base = OTHER; note = 2'-O-methoxyethyl guanosine
  modified_base 7: mod_base = OTHER; note = 2'-deoxy 5-methylcytidine
  modified_base 9: mod_base = OTHER; note = 2'-deoxy 5-methylcytidine
  modified_base 17: mod_base = OTHER; note = 2'-deoxy 5-methylcytidine
  modified_base 22: mod_base = OTHER; note = 2'-deoxy 5-methylcytidine
  modified_base 23: mod_base = OTHER; note = 2'-deoxy 5-methylcytidine
  modified_base 26: mod_base = OTHER; note = 2'-O-methoxyethyl guanosine
  modified_base 27: mod_base = OTHER; note = 2'-O-methoxyethyl adenosine
  modified_base 28: mod_base = OTHER; note = 2'-O-methoxyethyl guanosine
  modified_base 29: mod_base = OTHER; note = 2'-O-methoxyethyl adenosine
  modified_base 30: mod_base = OTHER; note = 2'-O-methoxyethyl adenosine
  misc_feature 1..5: note = RNA
  misc_feature 6..25: note = DNA
  misc_feature 26..30: note = RNA
aaatggcactagtaaactgagccaggagaa

SEQ ID NO: 534 - DNA, 30 bp, synthetic construct
  source 1..30: mol_type = other DNA
  modified_base 1: mod_base = OTHER; note = 2'-O-methoxyethyl uridine
  modified_base 2: mod_base = OTHER; note = 2'-O-methoxyethyl adenosine
  modified_base 3: mod_base = OTHER; note = 2'-O-methoxyethyl guanosine
  modified_base 4: mod_base = OTHER; note = 2'-O-methoxyethyl guanosine
  modified_base 5: mod_base = OTHER; note = 2'-O-methoxyethyl adenosine
  modified_base 9: mod_base = OTHER; note = 2'-deoxy 5-methylcytidine
  modified_base 10: mod_base = OTHER; note = 2'-deoxy 5-methylcytidine
  modified_base 12: mod_base = OTHER; note = 2'-deoxy 5-methylcytidine
  modified_base 22: mod_base = OTHER; note = 2'-deoxy 5-methylcytidine
  modified_base 25: mod_base = OTHER; note = 2'-deoxy 5-methylcytidine
  modified_base 26: mod_base = OTHER; note = 2'-O-methoxyethyl adenosine
  modified_base 27: mod_base = OTHER; note = 2'-O-methoxyethyl guanosine
  modified_base 28: mod_base = OTHER; note = 2'-O-methoxyethyl adenosine
  modified_base 29: mod_base = OTHER; note = 2'-O-methoxyethyl guanosine
  modified_base 30: mod_base = OTHER; note = 2'-O-methoxyethyl guanosine
  misc_feature 1..5: note = RNA
  misc_feature 6..25: note = DNA
  misc_feature 26..30: note = RNA
taggagttccgcagtatggatcggcagagg

SEQ ID NO: 535 - DNA, 30 bp, synthetic construct
  source 1..30: mol_type = other DNA
  modified_base 1: mod_base = OTHER; note = 2'-O-methoxyethyl 5-methylcytidine
  modified_base 2: mod_base = OTHER; note = 2'-O-methoxyethyl guanosine
  modified_base 3: mod_base = OTHER; note = 2'-O-methoxyethyl 5-methylcytidine
  modified_base 4: mod_base = OTHER; note = 2'-O-methoxyethyl adenosine
  modified_base 5: mod_base = OTHER; note = 2'-O-methoxyethyl guanosine
  modified_base 7: mod_base = OTHER; note = 2'-deoxy 5-methylcytidine
  modified_base 8: mod_base = OTHER; note = 2'-deoxy 5-methylcytidine
  modified_base 17: mod_base = OTHER; note = 2'-deoxy 5-methylcytidine
  modified_base 18: mod_base = OTHER; note = 2'-deoxy 5-methylcytidine
  modified_base 21: mod_base = OTHER; note = 2'-deoxy 5-methylcytidine
  modified_base 24: mod_base = OTHER; note = 2'-deoxy 5-methylcytidine
  modified_base 25: mod_base = OTHER; note = 2'-deoxy 5-methylcytidine
  modified_base 26: mod_base = OTHER; note = 2'-O-methoxyethyl uridine
  modified_base 27: mod_base = OTHER; note = 2'-O-methoxyethyl 5-methylcytidine
  modified_base 28: mod_base = OTHER; note = 2'-O-methoxyethyl 5-methylcytidine
  modified_base 29: mod_base = OTHER; note = 2'-O-methoxyethyl uridine
  modified_base 30: mod_base = OTHER; note = 2'-O-methoxyethyl adenosine
  misc_feature 1..5: note = RNA
  misc_feature 6..25: note = DNA
  misc_feature 26..30: note = RNA
cgcagaccaatttatgcctacagcctccta

SEQ ID NO: 536 - DNA, 30 bp, synthetic construct
  source 1..30: mol_type = other DNA
  modified_base 1: mod_base = OTHER; note = 2'-O-methoxyethyl adenosine
  modified_base 2: mod_base = OTHER; note = 2'-O-methoxyethyl guanosine
  modified_base 3: mod_base = OTHER; note = 2'-O-methoxyethyl adenosine
  modified_base 4: mod_base = OTHER; note = 2'-O-methoxyethyl guanosine
  modified_base 5: mod_base = OTHER; note = 2'-O-methoxyethyl guanosine
  modified_base 7: mod_base = OTHER; note = 2'-deoxy 5-methylcytidine
  modified_base 11: mod_base = OTHER; note = 2'-deoxy 5-methylcytidine
  modified_base 15: mod_base = OTHER; note = 2'-deoxy 5-methylcytidine
  modified_base 18: mod_base = OTHER; note = 2'-deoxy 5-methylcytidine
  modified_base 22: mod_base = OTHER; note = 2'-deoxy 5-methylcytidine
  modified_base 23: mod_base = OTHER; note = 2'-deoxy 5-methylcytidine
  modified_base 26: mod_base = OTHER; note = 2'-O-methoxyethyl guanosine
  modified_base 27: mod_base = OTHER; note = 2'-O-methoxyethyl adenosine
  modified_base 28: mod_base = OTHER; note = 2'-O-methoxyethyl uridine
  modified_base 29: mod_base = OTHER; note = 2'-O-methoxyethyl adenosine
  modified_base 30: mod_base = OTHER; note = 2'-O-methoxyethyl guanosine
  misc_feature 1..5: note = RNA
  misc_feature 6..25: note = DNA
  misc_feature 26..30: note = RNA
agaggacaaacgggcaacataccttgatag

SEQ ID NO: 537 - DNA, 20 bp, synthetic construct
  source 1..20: mol_type = other DNA
  modified_base 1: mod_base = OTHER; note = 2'-O-methoxyethyl guanosine
  modified_base 2: mod_base = OTHER; note = 2'-O-methoxyethyl guanosine
  modified_base 3: mod_base = OTHER; note = 2'-O-methoxyethyl adenosine
  modified_base 4: mod_base = OTHER; note = 2'-O-methoxyethyl uridine
  modified_base 5: mod_base = OTHER; note = 2'-O-methoxyethyl uridine
  modified_base 6: mod_base = OTHER; note = 2'-deoxy 5-methylcytidine
  modified_base 9: mod_base = OTHER; note = 2'-deoxy 5-methylcytidine
  modified_base 11: mod_base = OTHER; note = 2'-deoxy 5-methylcytidine
  modified_base 12: mod_base = OTHER; note = 2'-deoxy 5-methylcytidine
  modified_base 15: mod_base = OTHER; note = 2'-deoxy 5-methylcytidine
  modified_base 16: mod_base = OTHER; note = 2'-O-methoxyethyl guanosine
  modified_base 17: mod_base = OTHER; note = 2'-O-methoxyethyl guanosine
  modified_base 18: mod_base = OTHER; note = 2'-O-methoxyethyl guanosine
  modified_base 19: mod_base = OTHER; note = 2'-O-methoxyethyl adenosine
  modified_base 20: mod_base = OTHER; note = 2'-O-methoxyethyl 5-methylcytidine
  misc_feature 1..5: note = RNA
  misc_feature 6..15: note = DNA
  misc_feature 16..20: note = RNA
ggattcagcgccgacgggac

SEQ ID NO: 538 - DNA, 30 bp, synthetic construct
  source 1..30: mol_type = other DNA
  modified_base 1: mod_base = OTHER; note = 2'-O-methoxyethyl 5-methylcytidine
  modified_base 2: mod_base = OTHER; note = 2'-O-methoxyethyl 5-methylcytidine
  modified_base 3: mod_base = OTHER; note = 2'-O-methoxyethyl guanosine
  modified_base 4: mod_base = OTHER; note = 2'-O-methoxyethyl 5-methylcytidine
  modified_base 5: mod_base = OTHER; note = 2'-O-methoxyethyl adenosine
  modified_base 11: mod_base = OTHER; note = 2'-deoxy 5-methylcytidine
  modified_base 14: mod_base = OTHER; note = 2'-deoxy 5-methylcytidine
  modified_base 16: mod_base = OTHER; note = 2'-deoxy 5-methylcytidine
  modified_base 17: mod_base = OTHER; note = 2'-deoxy 5-methylcytidine
  modified_base 20: mod_base = OTHER; note = 2'-deoxy 5-methylcytidine
  modified_base 25: mod_base = OTHER; note = 2'-deoxy 5-methylcytidine
  modified_base 26: mod_base = OTHER; note = 2'-O-methoxyethyl guanosine
  modified_base 27: mod_base = OTHER; note = 2'-O-methoxyethyl uridine
  modified_base 28: mod_base = OTHER; note = 2'-O-methoxyethyl adenosine
  modified_base 29: mod_base = OTHER; note = 2'-O-methoxyethyl adenosine
  modified_base 30: mod_base = OTHER; note = 2'-O-methoxyethyl adenosine
  misc_feature 1..5: note = RNA
  misc_feature 6..25: note = DNA
  misc_feature 26..30: note = RNA
ccgcaggattcagcgccgacgggacgtaaa

SEQ ID NO: 539 - DNA, 25 bp, synthetic construct
  source 1..25: mol_type = other DNA
  modified_base 1: mod_base = OTHER; note = 2'-O-methoxyethyl 5-methylcytidine
  modified_base 2: mod_base = OTHER; note = 2'-O-methoxyethyl 5-methylcytidine
  modified_base 3: mod_base = OTHER; note = 2'-O-methoxyethyl 5-methylcytidine
  modified_base 4: mod_base = OTHER; note = 2'-O-methoxyethyl 5-methylcytidine
  modified_base 5: mod_base = OTHER; note = 2'-O-methoxyethyl thymidine
  modified_base 21: mod_base = OTHER; note = 2'-O-methoxyethyl guanosine
  modified_base 22: mod_base = OTHER; note = 2'-O-methoxyethyl thymidine
  modified_base 23: mod_base = OTHER; note = 2'-O-methoxyethyl 5-methylcytidine
  modified_base 24: mod_base = OTHER; note = 2'-O-methoxyethyl 5-methylcytidine
  modified_base 25: mod_base = OTHER; note = 2'-O-methoxyethyl adenosine
  misc_feature 1..5: note = RNA
  misc_feature 6..20: note = DNA
  misc_feature 21..25: note = RNA
cccctagaaaattgagagaagtcca

SEQ ID NO: 540 - DNA, 30 bp, synthetic construct
  source 1..30: mol_type = other DNA
  modified_base 1: mod_base = OTHER; note = 2'-O-methoxyethyl 5-methylcytidine
  modified_base 2: mod_base = OTHER; note = 2'-O-methoxyethyl 5-methylcytidine
  modified_base 3: mod_base = OTHER; note = 2'-O-methoxyethyl 5-methylcytidine
  modified_base 4: mod_base = OTHER; note = 2'-O-methoxyethyl 5-methylcytidine
  modified_base 5: mod_base = OTHER; note = 2'-O-methoxyethyl thymidine
  modified_base 23: mod_base = OTHER; note = 2'-deoxy 5-methylcytidine
  modified_base 24: mod_base = OTHER; note = 2'-deoxy 5-methylcytidine
  modified_base 26: mod_base = OTHER; note = 2'-O-methoxyethyl 5-methylcytidine
  modified_base 27: mod_base = OTHER; note = 2'-O-methoxyethyl 5-methylcytidine
  modified_base 28: mod_base = OTHER; note = 2'-O-methoxyethyl adenosine
  modified_base 29: mod_base = OTHER; note = 2'-O-methoxyethyl 5-methylcytidine
  modified_base 30: mod_base = OTHER; note = 2'-O-methoxyethyl guanosine
  misc_feature 1..5: note = RNA
  misc_feature 6..25: note = DNA
  misc_feature 26..30: note = RNA
cccctagaaaattgagagaagtccaccacg

SEQ ID NO: 541 - DNA, 25 bp, synthetic construct
  source 1..25: mol_type = other DNA
  modified_base 1: mod_base = OTHER; note = 2'-O-methoxyethyl adenosine
  modified_base 2: mod_base = OTHER; note = 2'-O-methoxyethyl guanosine
  modified_base 3: mod_base = OTHER; note = 2'-O-methoxyethyl adenosine
  modified_base 4: mod_base = OTHER; note = 2'-O-methoxyethyl adenosine
  modified_base 5: mod_base = OTHER; note = 2'-O-methoxyethyl adenosine
  modified_base 18: mod_base = OTHER; note = 2'-deoxy 5-methylcytidine
  modified_base 19: mod_base = OTHER; note = 2'-deoxy 5-methylcytidine
  modified_base 21: mod_base = OTHER; note = 2'-O-methoxyethyl 5-methylcytidine
  modified_base 22: mod_base = OTHER; note = 2'-O-methoxyethyl 5-methylcytidine
  modified_base 23: mod_base = OTHER; note = 2'-O-methoxyethyl adenosine
  modified_base 24: mod_base = OTHER; note = 2'-O-methoxyethyl 5-methylcytidine
  modified_base 25: mod_base = OTHER; note = 2'-O-methoxyethyl guanosine
  misc_feature 1..5: note = RNA
  misc_feature 6..20: note = DNA
  misc_feature 21..25: note = RNA
agaaaattgagagaagtccaccacg

SEQ ID NO: 542 - DNA, 30 bp, synthetic construct
  source 1..30: mol_type = other DNA
  modified_base 1: mod_base = OTHER; note = 2'-O-methoxyethyl adenosine
  modified_base 2: mod_base = OTHER; note = 2'-O-methoxyethyl guanosine
  modified_base 3: mod_base = OTHER; note = 2'-O-methoxyethyl adenosine
  modified_base 4: mod_base = OTHER; note = 2'-O-methoxyethyl adenosine
  modified_base 5: mod_base = OTHER; note = 2'-O-methoxyethyl adenosine
  modified_base 18: mod_base = OTHER; note = 2'-deoxy 5-methylcytidine
  modified_base 19: mod_base = OTHER; note = 2'-deoxy 5-methylcytidine
  modified_base 21: mod_base = OTHER; note = 2'-deoxy 5-methylcytidine
  modified_base 22: mod_base = OTHER; note = 2'-deoxy 5-methylcytidine
  modified_base 24: mod_base = OTHER; note = 2'-deoxy 5-methylcytidine
  modified_base 26: mod_base = OTHER; note = 2'-O-methoxyethyl adenosine
  modified_base 27: mod_base = OTHER; note = 2'-O-methoxyethyl guanosine
  modified_base 28: mod_base = OTHER; note = 2'-O-methoxyethyl thymidine
  modified_base 29: mod_base = OTHER; note = 2'-O-methoxyethyl 5-methylcytidine
  modified_base 30: mod_base = OTHER; note = 2'-O-methoxyethyl thymidine
  misc_feature 1..5: note = RNA
  misc_feature 6..25: note = DNA
  misc_feature 26..30: note = RNA
agaaaattgagagaagtccaccacgagtct

SEQ ID NO: 543 - DNA, 20 bp, synthetic construct
  source 1..20: mol_type = other DNA
  modified_base 1: mod_base = OTHER; note = 2'-O-methoxyethyl thymidine
  modified_base 2: mod_base = OTHER; note = 2'-O-methoxyethyl guanosine
  modified_base 3: mod_base = OTHER; note = 2'-O-methoxyethyl adenosine
  modified_base 4: mod_base = OTHER; note = 2'-O-methoxyethyl adenosine
  modified_base 5: mod_base = OTHER; note = 2'-O-methoxyethyl guanosine
  modified_base 6: mod_base = OTHER; note = 2'-deoxy 5-methylcytidine
  modified_base 13: mod_base = OTHER; note = 2'-deoxy 5-methylcytidine
  modified_base 15: mod_base = OTHER; note = 2'-deoxy 5-methylcytidine
  modified_base 16: mod_base = OTHER; note = 2'-O-methoxyethyl adenosine
  modified_base 17: mod_base = OTHER; note = 2'-O-methoxyethyl 5-methylcytidine
  modified_base 18: mod_base = OTHER; note = 2'-O-methoxyethyl guanosine
  modified_base 19: mod_base = OTHER; note = 2'-O-methoxyethyl guanosine
  modified_base 20: mod_base = OTHER; note = 2'-O-methoxyethyl thymidine
  misc_feature 1..5: note = RNA
  misc_feature 6..15: note = DNA
  misc_feature 16..20: note = RNA
tgaagcgaagtgcacacggt

SEQ ID NO: 544 - DNA, 20 bp, synthetic construct
  source 1..20: mol_type = other DNA
  modified_base 1: mod_base = OTHER; note = 2'-O-methoxyethyl guanosine
  modified_base 2: mod_base = OTHER; note = 2'-O-methoxyethyl adenosine
  modified_base 3: mod_base = OTHER; note = 2'-O-methoxyethyl adenosine
  modified_base 4: mod_base = OTHER; note = 2'-O-methoxyethyl guanosine
  modified_base 5: mod_base = OTHER; note = 2'-O-methoxyethyl 5-methylcytidine
  modified_base 12: mod_base = OTHER; note = 2'-deoxy 5-methylcytidine
  modified_base 14: mod_base = OTHER; note = 2'-deoxy 5-methylcytidine
  modified_base 16: mod_base = OTHER; note = 2'-O-methoxyethyl 5-methylcytidine
  modified_base 17: mod_base = OTHER; note = 2'-O-methoxyethyl guanosine
  modified_base 18: mod_base = OTHER; note = 2'-O-methoxyethyl guanosine
  modified_base 19: mod_base = OTHER; note = 2'-O-methoxyethyl thymidine
  modified_base 20: mod_base = OTHER; note = 2'-O-methoxyethyl 5-methylcytidine
  misc_feature 1..5: note = RNA
  misc_feature 6..15: note = DNA
  misc_feature 16..20: note = RNA
gaagcgaagtgcacacggtc

SEQ ID NO: 545 - DNA, 20 bp, synthetic construct
  source 1..20: mol_type = other DNA
  modified_base 1: mod_base = OTHER; note = 2'-O-methoxyethyl adenosine
  modified_base 2: mod_base = OTHER; note = 2'-O-methoxyethyl adenosine
  modified_base 3: mod_base = OTHER; note = 2'-O-methoxyethyl guanosine
  modified_base 4: mod_base = OTHER; note = 2'-O-methoxyethyl 5-methylcytidine
  modified_base 5: mod_base = OTHER; note = 2'-O-methoxyethyl guanosine
  modified_base 11: mod_base = OTHER; note = 2'-deoxy 5-methylcytidine
  modified_base 13: mod_base = OTHER; note = 2'-deoxy 5-methylcytidine
  modified_base 15: mod_base = OTHER; note = 2'-deoxy 5-methylcytidine
  modified_base 16: mod_base = OTHER; note = 2'-O-methoxyethyl guanosine
  modified_base 17: mod_base = OTHER; note = 2'-O-methoxyethyl guanosine
  modified_base 18: mod_base = OTHER; note = 2'-O-methoxyethyl thymidine
  modified_base 19: mod_base = OTHER; note = 2'-O-methoxyethyl 5-methylcytidine
  modified_base 20: mod_base = OTHER; note = 2'-O-methoxyethyl 5-methylcytidine
  misc_feature 1..5: note = RNA
  misc_feature 6..15: note = DNA
  misc_feature 16..20: note = RNA
aagcgaagtgcacacggtcc

SEQ ID NO: 546 - DNA, 20 bp, synthetic construct
  source 1..20: mol_type = other DNA
  modified_base 1: mod_base = OTHER; note = 2'-O-methoxyethyl adenosine
  modified_base 2: mod_base = OTHER; note = 2'-O-methoxyethyl guanosine
  modified_base 3: mod_base = OTHER; note = 2'-O-methoxyethyl 5-methylcytidine
  modified_base 4: mod_base = OTHER; note = 2'-O-methoxyethyl guanosine
  modified_base 5: mod_base = OTHER; note = 2'-O-methoxyethyl adenosine
  modified_base 10: mod_base = OTHER; note = 2'-deoxy 5-methylcytidine
  modified_base 12: mod_base = OTHER; note = 2'-deoxy 5-methylcytidine
  modified_base 14: mod_base = OTHER; note = 2'-deoxy 5-methylcytidine
  modified_base 16: mod_base = OTHER; note = 2'-O-methoxyethyl guanosine
  modified_base 17: mod_base = OTHER; note = 2'-O-methoxyethyl thymidine
  modified_base 18: mod_base = OTHER; note = 2'-O-methoxyethyl 5-methylcytidine
  modified_base 19: mod_base = OTHER; note = 2'-O-methoxyethyl 5-methylcytidine
  modified_base 20: mod_base = OTHER; note = 2'-O-methoxyethyl guanosine
  misc_feature 1..5: note = RNA
  misc_feature 6..15: note = DNA
  misc_feature 16..20: note = RNA
agcgaagtgcacacggtccg

SEQ ID NO: 547 - DNA, 20 bp, synthetic construct
  source 1..20: mol_type = other DNA
  modified_base 1: mod_base = OTHER; note = 2'-O-methoxyethyl guanosine
  modified_base 2: mod_base = OTHER; note = 2'-O-methoxyethyl 5-methylcytidine
  modified_base 3: mod_base = OTHER; note = 2'-O-methoxyethyl guanosine
  modified_base 4: mod_base = OTHER; note = 2'-O-methoxyethyl adenosine
  modified_base 5: mod_base = OTHER; note = 2'-O-methoxyethyl adenosine
  modified_base 9: mod_base = OTHER; note = 2'-deoxy 5-methylcytidine
  modified_base 11: mod_base = OTHER; note = 2'-deoxy 5-methylcytidine
  modified_base 13: mod_base = OTHER; note = 2'-deoxy 5-methylcytidine
  modified_base 16: mod_base = OTHER; note = 2'-O-methoxyethyl thymidine
  modified_base 17: mod_base = OTHER; note = 2'-O-methoxyethyl 5-methylcytidine
  modified_base 18: mod_base = OTHER; note = 2'-O-methoxyethyl 5-methylcytidine
  modified_base 19: mod_base = OTHER; note = 2'-O-methoxyethyl guanosine
  modified_base 20: mod_base = OTHER; note = 2'-O-methoxyethyl guanosine
  misc_feature 1..5: note = RNA
  misc_feature 6..15: note = DNA
  misc_feature 16..20: note = RNA
gcgaagtgcacacggtccgg

SEQ ID NO: 548 - DNA, 26 bp, synthetic construct
  source 1..26: mol_type = other DNA
  modified_base 1: mod_base = OTHER; note = 2'-O-methoxyethyl adenosine
  modified_base 2: mod_base = OTHER; note = 2'-O-methoxyethyl thymidine
  modified_base 3: mod_base = OTHER; note = 2'-O-methoxyethyl guanosine
  modified_base 4: mod_base = OTHER; note = 2'-O-methoxyethyl guanosine
  modified_base 5: mod_base = OTHER; note = 2'-O-methoxyethyl 5-methylcytidine
  modified_base 6: mod_base = OTHER; note = 2'-O-methoxyethyl adenosine
  modified_base 7: mod_base = OTHER; note = 2'-O-methoxyethyl 5-methylcytidine
  modified_base 8: mod_base = OTHER; note = 2'-O-methoxyethyl thymidine
  modified_base 15: mod_base = OTHER; note = 2'-deoxy 5-methylcytidine
  modified_base 19: mod_base = OTHER; note = 2'-O-methoxyethyl guanosine
  modified_base 20: mod_base = OTHER; note = 2'-O-methoxyethyl 5-methylcytidine
  modified_base 21: mod_base = OTHER; note = 2'-O-methoxyethyl 5-methylcytidine
  modified_base 22: mod_base = OTHER; note = 2'-O-methoxyethyl adenosine
  modified_base 23: mod_base = OTHER; note = 2'-O-methoxyethyl guanosine
  modified_base 24: mod_base = OTHER; note = 2'-O-methoxyethyl guanosine
  modified_base 25: mod_base = OTHER; note = 2'-O-methoxyethyl adenosine
  modified_base 26: mod_base = OTHER; note = 2'-O-methoxyethyl guanosine
  misc_feature 1..8: note = RNA
  misc_feature 9..18: note = DNA
  misc_feature 19..26: note = RNA
atggcactagtaaactgagccaggag

SEQ ID NO: 549 - DNA, 24 bp, synthetic construct
  source 1..24: mol_type = other DNA
  modified_base 1: mod_base = OTHER; note = 2'-O-methoxyethyl thymidine
  modified_base 2: mod_base = OTHER; note = 2'-O-methoxyethyl guanosine
  modified_base 3: mod_base = OTHER; note = 2'-O-methoxyethyl guanosine
  modified_base 4: mod_base = OTHER; note = 2'-O-methoxyethyl 5-methylcytidine
  modified_base 5: mod_base = OTHER; note = 2'-O-methoxyethyl adenosine
  modified_base 6: mod_base = OTHER; note = 2'-O-methoxyethyl 5-methylcytidine
  modified_base 7: mod_base = OTHER; note = 2'-O-methoxyethyl thymidine
  modified_base 14: mod_base = OTHER; note = 2'-deoxy 5-methylcytidine
  modified_base 18: mod_base = OTHER; note = 2'-O-methoxyethyl guanosine
  modified_base 19: mod_base = OTHER; note = 2'-O-methoxyethyl 5-methylcytidine
  modified_base 20: mod_base = OTHER; note = 2'-O-methoxyethyl 5-methylcytidine
  modified_base 21: mod_base = OTHER; note = 2'-O-methoxyethyl adenosine
  modified_base 22: mod_base = OTHER; note = 2'-O-methoxyethyl guanosine
  modified_base 23: mod_base = OTHER; note = 2'-O-methoxyethyl guanosine
  modified_base 24: mod_base = OTHER; note = 2'-O-methoxyethyl adenosine
  misc_feature 1..7: note = RNA
  misc_feature 8..17: note = DNA
  misc_feature 18..24: note = RNA
tggcactagtaaactgagccagga

SEQ ID NO: 550 - DNA, 22 bp, synthetic construct
  source 1..22: mol_type = other DNA
  modified_base 1: mod_base = OTHER; note = 2'-O-methoxyethyl guanosine
  modified_base 2: mod_base = OTHER; note = 2'-O-methoxyethyl guanosine
  modified_base 3: mod_base = OTHER; note = 2'-O-methoxyethyl 5-methylcytidine
  modified_base 4: mod_base = OTHER; note = 2'-O-methoxyethyl adenosine
  modified_base 5: mod_base = OTHER; note = 2'-O-methoxyethyl 5-methylcytidine
  modified_base 6: mod_base = OTHER; note = 2'-O-methoxyethyl thymidine
  modified_base 13: mod_base = OTHER; note = 2'-deoxy 5-methylcytidine
  modified_base 17: mod_base = OTHER; note = 2'-O-methoxyethyl guanosine
  modified_base 18: mod_base = OTHER; note = 2'-O-methoxyethyl 5-methylcytidine
  modified_base 19: mod_base = OTHER; note = 2'-O-methoxyethyl 5-methylcytidine
  modified_base 20: mod_base = OTHER; note = 2'-O-methoxyethyl adenosine
  modified_base 21: mod_base = OTHER; note = 2'-O-methoxyethyl guanosine
  modified_base 22: mod_base = OTHER; note = 2'-O-methoxyethyl guanosine
  misc_feature 1..6: note = RNA
  misc_feature 7..16: note = DNA
  misc_feature 17..22: note = RNA
ggcactagtaaactgagccagg

SEQ ID NO: 551 - DNA, 18 bp, synthetic construct
  source 1..18: mol_type = other DNA
  modified_base 1: mod_base = OTHER; note = 2'-O-methoxyethyl 5-methylcytidine
  modified_base 2: mod_base = OTHER; note = 2'-O-methoxyethyl adenosine
  modified_base 3: mod_base = OTHER; note = 2'-O-methoxyethyl 5-methylcytidine
  modified_base 4: mod_base = OTHER; note = 2'-O-methoxyethyl thymidine
  modified_base 11: mod_base = OTHER; note = 2'-deoxy 5-methylcytidine
  modified_base 15: mod_base = OTHER; note = 2'-O-methoxyethyl guanosine
  modified_base 16: mod_base = OTHER; note = 2'-O-methoxyethyl 5-methylcytidine
  modified_base 17: mod_base = OTHER; note = 2'-O-methoxyethyl 5-methylcytidine
  modified_base 18: mod_base = OTHER; note = 2'-O-methoxyethyl adenosine
  misc_feature 1..4: note = RNA
  misc_feature 5..14: note = DNA
  misc_feature 15..18: note = RNA
cactagtaaactgagcca

SEQ ID NO: 552 - DNA, 20 bp, synthetic construct
  source 1..20: mol_type = other DNA
  modified_base 1: mod_base = OTHER; note = 2'-O-methoxyethyl guanosine
  modified_base 2: mod_base = OTHER; note = 2'-O-methoxyethyl 5-methylcytidine
  modified_base 3: mod_base = OTHER; note = 2'-O-methoxyethyl adenosine
  modified_base 4: mod_base = OTHER; note = 2'-O-methoxyethyl 5-methylcytidine
  modified_base 5: mod_base = OTHER; note = 2'-O-methoxyethyl thymidine
  modified_base 6: mod_base = OTHER; note = 2'-O-methoxyethyl adenosine
  modified_base 7: mod_base = OTHER; note = 2'-O-methoxyethyl guanosine
  modified_base 8: mod_base = OTHER; note = 2'-O-methoxyethyl thymidine
  modified_base 9: mod_base = OTHER; note = 2'-O-methoxyethyl adenosine
  modified_base 10: mod_base = OTHER; note = 2'-O-methoxyethyl adenosine
  modified_base 11: mod_base = OTHER; note = 2'-O-methoxyethyl adenosine
  modified_base 12: mod_base = OTHER; note = 2'-O-methoxyethyl 5-methylcytidine
  modified_base 13: mod_base = OTHER; note = 2'-O-methoxyethyl thymidine
  modified_base 14: mod_base = OTHER; note = 2'-O-methoxyethyl guanosine
  modified_base 15: mod_base = OTHER; note = 2'-O-methoxyethyl adenosine
  modified_base 16: mod_base = OTHER; note = 2'-O-methoxyethyl guanosine
  modified_base 17: mod_base = OTHER; note = 2'-O-methoxyethyl 5-methylcytidine
  modified_base 18: mod_base = OTHER; note = 2'-O-methoxyethyl 5-methylcytidine
  modified_base 19: mod_base = OTHER; note = 2'-O-methoxyethyl adenosine
  modified_base 20: mod_base = OTHER; note = 2'-O-methoxyethyl guanosine
  misc_feature 1..20: note = RNA
gcactagtaaactgagccag

SEQ ID NO: 553 - DNA, 20 bp, synthetic construct
  source 1..20: mol_type = other DNA
  modified_base 1: mod_base = OTHER; note = 2'-O-methoxyethyl adenosine
  modified_base 2: mod_base = OTHER; note = 2'-O-methoxyethyl guanosine
  modified_base 3: mod_base = OTHER; note = 2'-O-methoxyethyl adenosine
  modified_base 4: mod_base = OTHER; note = 2'-O-methoxyethyl 5-methylcytidine
  modified_base 5: mod_base = OTHER; note = 2'-O-methoxyethyl thymidine
  modified_base 6: mod_base = OTHER; note = 2'-deoxy 5-methylcytidine
  modified_base 9: mod_base = OTHER; note = 2'-deoxy 5-methylcytidine
  modified_base 16: mod_base = OTHER; note = 2'-O-methoxyethyl guanosine
  modified_base 17: mod_base = OTHER; note = 2'-O-methoxyethyl thymidine
  modified_base 18: mod_base = OTHER; note = 2'-O-methoxyethyl guanosine
  modified_base 19: mod_base = OTHER; note = 2'-O-methoxyethyl adenosine
  modified_base 20: mod_base = OTHER; note = 2'-O-methoxyethyl guanosine
  misc_feature 1..5: note = RNA
  misc_feature 6..15: note = DNA
  misc_feature 16..20: note = RNA
agactctgcggtattgtgag

SEQ ID NO: 554 - DNA, 20 bp, synthetic construct
  source 1..20: mol_type = other DNA
  modified_base 1: mod_base = OTHER; note = 2'-O-methoxyethyl guanosine
  modified_base 2: mod_base = OTHER; note = 2'-O-methoxyethyl adenosine
  modified_base 3: mod_base = OTHER; note = 2'-O-methoxyethyl 5-methylcytidine
  modified_base 4: mod_base = OTHER; note = 2'-O-methoxyethyl thymidine
  modified_base 5: mod_base = OTHER; note = 2'-O-methoxyethyl 5-methylcytidine
  modified_base 8: mod_base = OTHER; note = 2'-deoxy 5-methylcytidine
  modified_base 16: mod_base = OTHER; note = 2'-O-methoxyethyl thymidine
  modified_base 17: mod_base = OTHER; note = 2'-O-methoxyethyl guanosine
  modified_base 18: mod_base = OTHER; note = 2'-O-methoxyethyl adenosine
  modified_base 19: mod_base = OTHER; note = 2'-O-methoxyethyl guanosine
  modified_base 20: mod_base = OTHER; note = 2'-O-methoxyethyl guanosine
  misc_feature 1..5: note = RNA
  misc_feature 6..15: note = DNA
  misc_feature 16..20: note = RNA
gactctgcggtattgtgagg

SEQ ID NO: 555 - DNA, 20 bp, synthetic construct
  source 1..20: mol_type = other DNA
  modified_base 1: mod_base = OTHER; note = 2'-O-methoxyethyl adenosine
  modified_base 2: mod_base = OTHER; note = 2'-O-methoxyethyl 5-methylcytidine
  modified_base 3: mod_base = OTHER; note = 2'-O-methoxyethyl thymidine
  modified_base 4: mod_base = OTHER; note = 2'-O-methoxyethyl 5-methylcytidine
  modified_base 5: mod_base = OTHER; note = 2'-O-methoxyethyl thymidine
  modified_base 7: mod_base = OTHER; note = 2'-deoxy 5-methylcytidine
  modified_base 16: mod_base = OTHER; note = 2'-O-methoxyethyl guanosine
  modified_base 17: mod_base = OTHER; note = 2'-O-methoxyethyl adenosine
  modified_base 18: mod_base = OTHER; note = 2'-O-methoxyethyl guanosine
  modified_base 19: mod_base = OTHER; note = 2'-O-methoxyethyl guanosine
  modified_base 20: mod_base = OTHER; note = 2'-O-methoxyethyl adenosine
  misc_feature 1..5: note = RNA
  misc_feature 6..15: note = DNA
  misc_feature 16..20: note = RNA
actctgcggtattgtgagga

SEQ ID NO: 556 - DNA, 20 bp, synthetic construct
  source 1..20: mol_type = other DNA
  modified_base 1: mod_base = OTHER; note = 2'-O-methoxyethyl 5-methylcytidine
  modified_base 2: mod_base = OTHER; note = 2'-O-methoxyethyl thymidine
  modified_base 3: mod_base = OTHER; note = 2'-O-methoxyethyl 5-methylcytidine
  modified_base 4: mod_base = OTHER; note = 2'-O-methoxyethyl thymidine
  modified_base 5: mod_base = OTHER; note = 2'-O-methoxyethyl guanosine
  modified_base 6: mod_base = OTHER; note = 2'-deoxy 5-methylcytidine
  modified_base 16: mod_base = OTHER; note = 2'-O-methoxyethyl adenosine
  modified_base 17: mod_base = OTHER; note = 2'-O-methoxyethyl guanosine
  modified_base 18: mod_base = OTHER; note = 2'-O-methoxyethyl guanosine
  modified_base 19: mod_base = OTHER; note = 2'-O-methoxyethyl adenosine
  modified_base 20: mod_base = OTHER; note = 2'-O-methoxyethyl thymidine
  misc_feature 1..5: note = RNA
  misc_feature 6..15: note = DNA
  misc_feature 16..20: note = RNA
ctctgcggtattgtgaggat

SEQ ID NO: 557 - DNA, 20 bp, synthetic construct
  source 1..20: mol_type = other DNA
  modified_base 1: mod_base = OTHER; note = 2'-O-methoxyethyl thymidine
  modified_base 2: mod_base = OTHER; note = 2'-O-methoxyethyl 5-methylcytidine
  modified_base 3: mod_base = OTHER; note = 2'-O-methoxyethyl thymidine
  modified_base 4: mod_base = OTHER; note = 2'-O-methoxyethyl guanosine
  modified_base 5: mod_base = OTHER; note = 2'-O-methoxyethyl 5-methylcytidine
  modified_base 16: mod_base = OTHER; note = 2'-O-methoxyethyl guanosine
  modified_base 17: mod_base = OTHER; note = 2'-O-methoxyethyl guanosine
  modified_base 18: mod_base = OTHER; note = 2'-O-methoxyethyl adenosine
  modified_base 19: mod_base = OTHER; note = 2'-O-methoxyethyl thymidine
  modified_base 20: mod_base = OTHER; note = 2'-O-methoxyethyl thymidine
  misc_feature 1..5: note = RNA
  misc_feature 6..15: note = DNA
  misc_feature 16..20: note = RNA
tctgcggtattgtgaggatt

SEQ ID NO: 558 - DNA, 20 bp, synthetic construct
  source 1..20: mol_type = other DNA
  modified_base 1: mod_base = OTHER; note = 2'-O-methoxyethyl 5-methylcytidine
  modified_base 2: mod_base = OTHER; note = 2'-O-methoxyethyl thymidine
  modified_base 3: mod_base = OTHER; note = 2'-O-methoxyethyl guanosine
  modified_base 4: mod_base = OTHER; note = 2'-O-methoxyethyl 5-methylcytidine
  modified_base 5: mod_base = OTHER; note = 2'-O-methoxyethyl guanosine
  modified_base 16: mod_base = OTHER; note = 2'-O-methoxyethyl guanosine
  modified_base 17: mod_base = OTHER; note = 2'-O-methoxyethyl adenosine
  modified_base 18: mod_base = OTHER; note = 2'-O-methoxyethyl thymidine
  modified_base 19: mod_base = OTHER; note = 2'-O-methoxyethyl thymidine
  modified_base 20: mod_base = OTHER; note = 2'-O-methoxyethyl 5-methylcytidine
  misc_feature 1..5: note = RNA
  misc_feature 6..15: note = DNA
  misc_feature 16..20: note = RNA
ctgcggtattgtgaggattc

SEQ ID NO: 559 - DNA, 20 bp, synthetic construct
  source 1..20: mol_type = other DNA
  modified_base 1: mod_base = OTHER; note = 2'-O-methoxyethyl thymidine
  modified_base 2: mod_base = OTHER; note = 2'-O-methoxyethyl guanosine
  modified_base 3: mod_base = OTHER; note = 2'-O-methoxyethyl 5-methylcytidine
  modified_base 4: mod_base = OTHER; note = 2'-O-methoxyethyl guanosine
  modified_base 5: mod_base = OTHER; note = 2'-O-methoxyethyl guanosine
  modified_base 16: mod_base = OTHER; note = 2'-O-methoxyethyl adenosine
  modified_base 17: mod_base = OTHER; note = 2'-O-methoxyethyl thymidine
  modified_base 18: mod_base = OTHER; note = 2'-O-methoxyethyl thymidine
  modified_base 19: mod_base = OTHER; note = 2'-O-methoxyethyl 5-methylcytidine
  modified_base 20: mod_base = OTHER; note = 2'-O-methoxyethyl thymidine
  misc_feature 1..5: note = RNA
  misc_feature 6..15: note = DNA
  misc_feature 16..20: note = RNA
tgcggtattgtgaggattct

SEQ ID NO: 560 - DNA, 20 bp, synthetic construct
  source 1..20: mol_type = other DNA
  modified_base 1: mod_base = OTHER; note = 2'-O-methoxyethyl guanosine
  modified_base 2: mod_base = OTHER; note = 2'-O-methoxyethyl 5-methylcytidine
  modified_base 3: mod_base = OTHER; note = 2'-O-methoxyethyl guanosine
  modified_base 4: mod_base = OTHER; note = 2'-O-methoxyethyl guanosine
  modified_base 5: mod_base = OTHER; note = 2'-O-methoxyethyl thymidine
  modified_base 16: mod_base = OTHER; note = 2'-O-methoxyethyl thymidine
  modified_base 17: mod_base = OTHER; note = 2'-O-methoxyethyl thymidine
  modified_base 18: mod_base = OTHER; note = 2'-O-methoxyethyl 5-methylcytidine
  modified_base 19: mod_base = OTHER; note = 2'-O-methoxyethyl thymidine
  modified_base 20: mod_base = OTHER; note = 2'-O-methoxyethyl thymidine
  misc_feature 1..5: note = RNA
  misc_feature 6..15: note = DNA
  misc_feature 16..20: note = RNA
gcggtattgtgaggattctt

SEQ ID NO: 561 - DNA, 20 bp, synthetic construct
  source 1..20: mol_type = other DNA
  modified_base 1: mod_base = OTHER; note = 2'-O-methoxyethyl 5-methylcytidine
  modified_base 2: mod_base = OTHER; note = 2'-O-methoxyethyl guanosine
  modified_base 3: mod_base = OTHER; note = 2'-O-methoxyethyl guanosine
  modified_base 4: mod_base = OTHER; note = 2'-O-methoxyethyl thymidine
  modified_base 5: mod_base = OTHER; note = 2'-O-methoxyethyl adenosine
  modified_base 16: mod_base = OTHER; note = 2'-O-methoxyethyl thymidine
  modified_base 17: mod_base = OTHER; note = 2'-O-methoxyethyl 5-methylcytidine
  modified_base 18: mod_base = OTHER; note = 2'-O-methoxyethyl thymidine
  modified_base 19: mod_base = OTHER; note = 2'-O-methoxyethyl thymidine
  modified_base 20: mod_base = OTHER; note = 2'-O-methoxyethyl guanosine
  misc_feature 1..5: note = RNA
  misc_feature 6..15: note = DNA
  misc_feature 16..20: note = RNA
cggtattgtgaggattcttg

SEQ ID NO: 562 - DNA, 20 bp, synthetic construct
  source 1..20: mol_type = other DNA
  modified_base 1: mod_base = OTHER; note = 2'-O-methoxyethyl guanosine
  modified_base 2: mod_base = OTHER; note = 2'-O-methoxyethyl guanosine
  modified_base 3: mod_base = OTHER; note = 2'-O-methoxyethyl 5-methylcytidine
  modified_base 4: mod_base = OTHER; note = 2'-O-methoxyethyl adenosine
  modified_base 5: mod_base = OTHER; note = 2'-O-methoxyethyl 5-methylcytidine
  modified_base 13: mod_base = OTHER; note = 2'-deoxy 5-methylcytidine
  modified_base 16: mod_base = OTHER; note = 2'-O-methoxyethyl adenosine
  modified_base 17: mod_base = OTHER; note = 2'-O-methoxyethyl guanosine
  modified_base 18: mod_base = OTHER; note = 2'-O-methoxyethyl 5-methylcytidine
  modified_base 19: mod_base = OTHER; note = 2'-O-methoxyethyl 5-methylcytidine
  modified_base 20: mod_base = OTHER; note = 2'-O-methoxyethyl adenosine
  misc_feature 1..5: note = RNA
  misc_feature 6..15: note = DNA
  misc_feature 16..20: note = RNA
ggcactagtaaactgagcca

SEQ ID NO: 563 - DNA, 20 bp, synthetic construct
  source 1..20: mol_type = other DNA
  modified_base 1: mod_base = OTHER; note = 2'-O-methoxyethyl guanosine
  modified_base 2: mod_base = OTHER; note = 2'-O-methoxyethyl 5-methylcytidine
  modified_base 3: mod_base = OTHER; note = 2'-O-methoxyethyl adenosine
  modified_base 4: mod_base = OTHER; note = 2'-O-methoxyethyl 5-methylcytidine
  modified_base 5: mod_base = OTHER; note = 2'-O-methoxyethyl thymidine
  modified_base 12: mod_base = OTHER; note = 2'-deoxy 5-methylcytidine
  modified_base 16: mod_base = OTHER; note = 2'-O-methoxyethyl guanosine
  modified_base 17: mod_base = OTHER; note = 2'-O-methoxyethyl 5-methylcytidine
  modified_base 18: mod_base = OTHER; note = 2'-O-methoxyethyl 5-methylcytidine
  modified_base 19: mod_base = OTHER; note = 2'-O-methoxyethyl adenosine
  modified_base 20: mod_base = OTHER; note = 2'-O-methoxyethyl guanosine
  misc_feature 1..5: note = RNA
  misc_feature 6..15: note = DNA
  misc_feature 16..20: note = RNA
gcactagtaaactgagccag

SEQ ID NO: 564 - DNA, 20 bp, synthetic construct
  source 1..20: mol_type = other DNA
  modified_base 1: mod_base = OTHER; note = 2'-O-methoxyethyl 5-methylcytidine
  modified_base 2: mod_base = OTHER; note = 2'-O-methoxyethyl adenosine
  modified_base 3: mod_base = OTHER; note = 2'-O-methoxyethyl 5-methylcytidine
  modified_base 4: mod_base = OTHER; note = 2'-O-methoxyethyl thymidine
  modified_base 5: mod_base = OTHER; note = 2'-O-methoxyethyl adenosine
  modified_base 11: mod_base = OTHER; note = 2'-deoxy 5-methylcytidine
  modified_base 16: mod_base = OTHER; note = 2'-O-methoxyethyl 5-methylcytidine
  modified_base 17: mod_base = OTHER; note = 2'-O-methoxyethyl 5-methylcytidine
  modified_base 18: mod_base = OTHER; note = 2'-O-methoxyethyl adenosine
  modified_base 19: mod_base = OTHER; note = 2'-O-methoxyethyl guanosine
  modified_base 20: mod_base = OTHER; note = 2'-O-methoxyethyl guanosine
  misc_feature 1..5: note = RNA
  misc_feature 6..15: note = DNA
  misc_feature 16..20: note = RNA
cactagtaaactgagccagg

SEQ ID NO: 565 - DNA, 20 bp, synthetic construct
  source 1..20: mol_type = other DNA
  modified_base 1: mod_base = OTHER; note = 2'-O-methoxyethyl adenosine
  modified_base 2: mod_base = OTHER; note = 2'-O-methoxyethyl 5-methylcytidine
  modified_base 3: mod_base = OTHER; note = 2'-O-methoxyethyl thymidine
  modified_base 4: mod_base = OTHER; note = 2'-O-methoxyethyl adenosine
  modified_base 5: mod_base = OTHER; note = 2'-O-methoxyethyl guanosine
  modified_base 10: mod_base = OTHER; note = 2'-deoxy 5-methylcytidine
  modified_base 15: mod_base = OTHER; note = 2'-deoxy 5-methylcytidine
  modified_base 16: mod_base = OTHER; note = 2'-O-methoxyethyl 5-methylcytidine
  modified_base 17: mod_base = OTHER; note = 2'-O-methoxyethyl adenosine
  modified_base 18: mod_base = OTHER; note = 2'-O-methoxyethyl guanosine
  modified_base 19: mod_base = OTHER; note = 2'-O-methoxyethyl guanosine
  modified_base 20: mod_base = OTHER; note = 2'-O-methoxyethyl adenosine
  misc_feature 1..5: note = RNA
  misc_feature 6..15: note = DNA
  misc_feature 16..20: note = RNA
actagtaaactgagccagga

SEQ ID NO: 566 - DNA, 20 bp, synthetic construct
  source 1..20: mol_type = other DNA
  modified_base 1: mod_base = OTHER; note = 2'-O-methoxyethyl thymidine
  modified_base 2: mod_base = OTHER; note = 2'-O-methoxyethyl thymidine
  modified_base 3: mod_base = OTHER; note = 2'-O-methoxyethyl 5-methylcytidine
  modified_base 4: mod_base = OTHER; note = 2'-O-methoxyethyl 5-methylcytidine
  modified_base 5: mod_base = OTHER; note = 2'-O-methoxyethyl guanosine
  modified_base 6: mod_base = OTHER; note = 2'-deoxy 5-methylcytidine
  modified_base 16: mod_base = OTHER; note = 2'-O-methoxyethyl 5-methylcytidine
  modified_base 17: mod_base = OTHER; note = 2'-O-methoxyethyl guanosine
  modified_base 18: mod_base = OTHER; note = 2'-O-methoxyethyl guanosine
  modified_base 19: mod_base = OTHER; note = 2'-O-methoxyethyl 5-methylcytidine
  modified_base 20: mod_base = OTHER; note = 2'-O-methoxyethyl adenosine
  misc_feature 1..5: note = RNA
  misc_feature 6..15: note = DNA
  misc_feature 16..20: note = RNA
ttccgcagtatggatcggca

SEQ ID NO: 567 - DNA, 20 bp, synthetic construct
  source 1..20: mol_type = other DNA
  modified_base 1: mod_base = OTHER; note = 2'-O-methoxyethyl thymidine
  modified_base 2: mod_base = OTHER; note = 2'-O-methoxyethyl 5-methylcytidine
  modified_base 3: mod_base = OTHER; note = 2'-O-methoxyethyl 5-methylcytidine
  modified_base 4: mod_base = OTHER; note = 2'-O-methoxyethyl guanosine
  modified_base 5: mod_base = OTHER; note = 2'-O-methoxyethyl 5-methylcytidine
  modified_base 15: mod_base = OTHER; note = 2'-deoxy 5-methylcytidine
  modified_base 16: mod_base = OTHER; note = 2'-O-methoxyethyl guanosine
  modified_base 17: mod_base = OTHER; note = 2'-O-methoxyethyl guanosine
  modified_base 18: mod_base = OTHER; note = 2'-O-methoxyethyl 5-methylcytidine
  modified_base 19: mod_base = OTHER; note = 2'-O-methoxyethyl adenosine
  modified_base 20: mod_base = OTHER; note = 2'-O-methoxyethyl guanosine
  misc_feature 1..5: note = RNA
  misc_feature 6..15: note = DNA
  misc_feature 16..20: note = RNA
tccgcagtatggatcggcag

SEQ ID NO: 568 - DNA, 20 bp, synthetic construct
  source 1..20: mol_type = other DNA
  modified_base 1: mod_base = OTHER; note = 2'-O-methoxyethyl 5-methylcytidine
  modified_base 2: mod_base = OTHER; note = 2'-O-methoxyethyl 5-methylcytidine
  modified_base 3: mod_base = OTHER; note = 2'-O-methoxyethyl guanosine
  modified_base 4: mod_base = OTHER; note = 2'-O-methoxyethyl 5-methylcytidine
  modified_base 5: mod_base = OTHER; note = 2'-O-methoxyethyl adenosine
  modified_base 14: mod_base = OTHER; note = 2'-deoxy 5-methylcytidine
  modified_base 16: mod_base = OTHER; note = 2'-O-methoxyethyl guanosine
  modified_base 17: mod_base = OTHER; note = 2'-O-methoxyethyl 5-methylcytidine
  modified_base 18: mod_base = OTHER; note = 2'-O-methoxyethyl adenosine
  modified_base 19: mod_base = OTHER; note = 2'-O-methoxyethyl guanosine
  modified_base 20: mod_base = OTHER; note = 2'-O-methoxyethyl adenosine
  misc_feature 1..5: note = RNA
  misc_feature 6..15: note = DNA
  misc_feature 16..20: note = RNA
ccgcagtatggatcggcaga

SEQ ID NO: 569 - DNA, 20 bp, synthetic construct
  source 1..20: mol_type = other DNA
  modified_base 1: mod_base = OTHER; note = 2'-O-methoxyethyl 5-methylcytidine
  modified_base 2: mod_base = OTHER; note = 2'-O-methoxyethyl guanosine
  modified_base 3: mod_base = OTHER; note = 2'-O-methoxyethyl 5-methylcytidine
  modified_base 4: mod_base = OTHER; note = 2'-O-methoxyethyl adenosine
  modified_base 5: mod_base = OTHER; note = 2'-O-methoxyethyl guanosine
  modified_base 13: mod_base = OTHER; note = 2'-deoxy 5-methylcytidine
  modified_base 16: mod_base = OTHER; note = 2'-O-methoxyethyl 5-methylcytidine
  modified_base 17: mod_base = OTHER; note = 2'-O-methoxyethyl adenosine
  modified_base 18: mod_base = OTHER; note = 2'-O-methoxyethyl guanosine
  modified_base 19: mod_base = OTHER; note = 2'-O-methoxyethyl adenosine
  modified_base 20: mod_base = OTHER; note = 2'-O-methoxyethyl guanosine
  misc_feature 1..5: note = RNA
  misc_feature 6..15: note = DNA
  misc_feature 16..20: note = RNA
cgcagtatggatcggcagag

SEQ ID NO: 570 - DNA, 20 bp, synthetic construct
  source 1..20: mol_type = other DNA
  modified_base 1: mod_base = OTHER; note = 2'-O-methoxyethyl 5-methylcytidine
  modified_base 2: mod_base = OTHER; note = 2'-O-methoxyethyl guanosine
  modified_base 3: mod_base = OTHER; note = 2'-O-methoxyethyl adenosine
  modified_base 4: mod_base = OTHER; note = 2'-O-methoxyethyl adenosine
  modified_base 5: mod_base = OTHER; note = 2'-O-methoxyethyl guanosine
  modified_base 8: mod_base = OTHER; note = 2'-deoxy 5-methylcytidine
  modified_base 10: mod_base = OTHER; note = 2'-deoxy 5-methylcytidine
  modified_base 12: mod_base = OTHER; note = 2'-deoxy 5-methylcytidine
  modified_base 16: mod_base = OTHER; note = 2'-O-methoxyethyl 5-methylcytidine
  modified_base 17: mod_base = OTHER; note = 2'-O-methoxyethyl 5-methylcytidine
  modified_base 18: mod_base = OTHER; note = 2'-O-methoxyethyl guanosine
  modified_base 19: mod_base = OTHER; note = 2'-O-methoxyethyl guanosine
  modified_base 20: mod_base = OTHER; note = 2'-O-methoxyethyl 5-methylcytidine
  misc_feature 1..5: note = RNA
  misc_feature 6..15: note = DNA
  misc_feature 16..20: note = RNA
cgaagtgcacacggtccggc

SEQ ID NO: 571 - DNA, 20 bp, synthetic construct
  source 1..20: mol_type = other DNA
  modified_base 1: mod_base = OTHER; note = 2'-O-methoxyethyl guanosine
  modified_base 2: mod_base = OTHER; note = 2'-O-methoxyethyl adenosine
  modified_base 3: mod_base = OTHER; note = 2'-O-methoxyethyl adenosine
  modified_base 4: mod_base = OTHER; note = 2'-O-methoxyethyl guanosine
  modified_base 5: mod_base = OTHER; note = 2'-O-methoxyethyl thymidine
  modified_base 7: mod_base = OTHER; note = 2'-deoxy 5-methylcytidine
  modified_base 9: mod_base = OTHER; note = 2'-deoxy 5-methylcytidine
  modified_base 11: mod_base = OTHER; note = 2'-deoxy 5-methylcytidine
  modified_base 15: mod_base = OTHER; note = 2'-deoxy 5-methylcytidine
  modified_base 16: mod_base = OTHER; note = 2'-O-methoxyethyl 5-methylcytidine
  modified_base 17: mod_base = OTHER; note = 2'-O-methoxyethyl guanosine
  modified_base 18: mod_base = OTHER; note = 2'-O-methoxyethyl guanosine
  modified_base 19: mod_base = OTHER; note = 2'-O-methoxyethyl 5-methylcytidine
  modified_base 20: mod_base = OTHER; note = 2'-O-methoxyethyl adenosine
  misc_feature 1..5: note = RNA
  misc_feature 6..15: note = DNA
  misc_feature 16..20: note = RNA
gaagtgcacacggtccggca

SEQ ID NO: 572 - DNA, 20 bp, synthetic construct
  source 1..20: mol_type = other DNA
  modified_base 1: mod_base = OTHER; note = 2'-O-methoxyethyl adenosine
  modified_base 2: mod_base = OTHER; note = 2'-O-methoxyethyl adenosine
  modified_base 3: mod_base = OTHER; note = 2'-O-methoxyethyl guanosine
  modified_base 4: mod_base = OTHER; note = 2'-O-methoxyethyl thymidine
  modified_base 5: mod_base = OTHER; note = 2'-O-methoxyethyl guanosine
  modified_base 6: mod_base = OTHER; note = 2'-deoxy 5-methylcytidine
  modified_base 8: mod_base = OTHER; note = 2'-deoxy 5-methylcytidine
  modified_base 10: mod_base = OTHER; note = 2'-deoxy 5-methylcytidine
  modified_base 14: mod_base = OTHER; note = 2'-deoxy 5-methylcytidine
  modified_base 15: mod_base = OTHER; note = 2'-deoxy 5-methylcytidine
  modified_base 16: mod_base = OTHER; note = 2'-O-methoxyethyl guanosine
  modified_base 17: mod_base = OTHER; note = 2'-O-methoxyethyl guanosine
  modified_base 18: mod_base = OTHER; note = 2'-O-methoxyethyl 5-methylcytidine
  modified_base 19: mod_base = OTHER; note = 2'-O-methoxyethyl adenosine
  modified_base 20: mod_base = OTHER; note = 2'-O-methoxyethyl guanosine
  misc_feature 1..5: note = RNA
  misc_feature 6..15: note = DNA
  misc_feature 16..20: note = RNA
aagtgcacacggtccggcag

SEQ ID NO: 573 - DNA, 20 bp, synthetic construct
  source 1..20: mol_type = other DNA
  modified_base 1: mod_base = OTHER; note = 2'-O-methoxyethyl guanosine
  modified_base 2: mod_base = OTHER; note = 2'-O-methoxyethyl thymidine
  modified_base 3: mod_base = OTHER; note = 2'-O-methoxyethyl guanosine
  modified_base 4: mod_base = OTHER; note = 2'-O-methoxyethyl 5-methylcytidine
  modified_base 5: mod_base = OTHER; note = 2'-O-methoxyethyl adenosine
  modified_base 6: mod_base = OTHER; note = 2'-deoxy 5-methylcytidine
  modified_base 8: mod_base = OTHER; note = 2'-deoxy 5-methylcytidine
  modified_base 12: mod_base = OTHER; note = 2'-deoxy 5-methylcytidine
  modified_base 13: mod_base = OTHER; note = 2'-deoxy 5-methylcytidine
  modified_base 16: mod_base = OTHER; note = 2'-O-methoxyethyl 5-methylcytidine
  modified_base 17: mod_base = OTHER; note = 2'-O-methoxyethyl adenosine
  modified_base 18: mod_base = OTHER; note = 2'-O-methoxyethyl guanosine
  modified_base 19: mod_base = OTHER; note = 2'-O-methoxyethyl adenosine
  modified_base 20: mod_base = OTHER; note = 2'-O-methoxyethyl thymidine
  misc_feature 1..5: note = RNA
  misc_feature 6..15: note = DNA
  misc_feature 16..20: note = RNA
gtgcacacggtccggcagat

SEQ ID NO: 574 - DNA, 20 bp, synthetic construct
  source 1..20: mol_type = other DNA
  modified_base 1: mod_base = OTHER; note = 2'-O-methoxyethyl guanosine
  modified_base 2: mod_base = OTHER; note = 2'-O-methoxyethyl 5-methylcytidine
  modified_base 3: mod_base = OTHER; note = 2'-O-methoxyethyl adenosine
  modified_base 4: mod_base = OTHER; note = 2'-O-methoxyethyl 5-methylcytidine
  modified_base 5: mod_base = OTHER; note = 2'-O-methoxyethyl adenosine
  modified_base 6: mod_base = OTHER; note = 2'-deoxy 5-methylcytidine
  modified_base 10: mod_base = OTHER; note = 2'-deoxy 5-methylcytidine
  modified_base 11: mod_base = OTHER; note = 2'-deoxy 5-methylcytidine
  modified_base 14: mod_base = OTHER; note = 2'-deoxy 5-methylcytidine
  modified_base 16: mod_base = OTHER; note = 2'-O-methoxyethyl guanosine
  modified_base 17: mod_base = OTHER; note = 2'-O-methoxyethyl adenosine
  modified_base 18: mod_base = OTHER; note = 2'-O-methoxyethyl thymidine
  modified_base 19: mod_base = OTHER; note = 2'-O-methoxyethyl guanosine
  modified_base 20: mod_base = OTHER; note = 2'-O-methoxyethyl adenosine
  misc_feature 1..5: note = RNA
  misc_feature 6..15: note = DNA
  misc_feature 16..20: note = RNA
gcacacggtccggcagatga

SEQ ID NO: 575 - DNA, 20 bp, synthetic construct
  source 1..20: mol_type = other DNA
  modified_base 1: mod_base = OTHER; note = 2'-O-methoxyethyl adenosine
  modified_base 2: mod_base = OTHER; note = 2'-O-methoxyethyl 5-methylcytidine
  modified_base 3: mod_base = OTHER; note = 2'-O-methoxyethyl adenosine
  modified_base 4: mod_base = OTHER; note = 2'-O-methoxyethyl 5-methylcytidine
  modified_base 5: mod_base = OTHER; note = 2'-O-methoxyethyl guanosine
  modified_base 8: mod_base = OTHER; note = 2'-deoxy 5-methylcytidine
  modified_base 9: mod_base = OTHER; note = 2'-deoxy 5-methylcytidine
  modified_base 12: mod_base = OTHER; note = 2'-deoxy 5-methylcytidine
  modified_base 16: mod_base = OTHER; note = 2'-O-methoxyethyl thymidine
  modified_base 17: mod_base = OTHER; note = 2'-O-methoxyethyl guanosine
  modified_base 18: mod_base = OTHER; note = 2'-O-methoxyethyl adenosine
  modified_base 19: mod_base = OTHER; note = 2'-O-methoxyethyl guanosine
  modified_base 20: mod_base = OTHER; note = 2'-O-methoxyethyl adenosine
  misc_feature 1..5: note = RNA
  misc_feature 6..15: note = DNA
  misc_feature 16..20: note = RNA
acacggtccggcagatgaga

SEQ ID NO: 576 - DNA, 20 bp, synthetic construct
  source 1..20: mol_type = other DNA
  modified_base 1: mod_base = OTHER; note = 2'-O-methoxyethyl adenosine
  modified_base 2: mod_base = OTHER; note = 2'-O-methoxyethyl 5-methylcytidine
  modified_base 3: mod_base = OTHER; note = 2'-O-methoxyethyl guanosine
  modified_base 4: mod_base = OTHER; note = 2'-O-methoxyethyl guanosine
  modified_base 5: mod_base = OTHER; note = 2'-O-methoxyethyl thymidine
  modified_base 6: mod_base = OTHER; note = 2'-deoxy 5-methylcytidine
  modified_base 7: mod_base = OTHER; note = 2'-deoxy 5-methylcytidine
  modified_base 10: mod_base = OTHER; note = 2'-deoxy 5-methylcytidine
  modified_base 16: mod_base = OTHER; note = 2'-O-methoxyethyl adenosine
  modified_base 17: mod_base = OTHER; note = 2'-O-methoxyethyl guanosine
  modified_base 18: mod_base = OTHER; note = 2'-O-methoxyethyl adenosine
  modified_base 19: mod_base = OTHER; note = 2'-O-methoxyethyl adenosine
  modified_base 20: mod_base = OTHER; note = 2'-O-methoxyethyl guanosine
  misc_feature 1..5: note = RNA
  misc_feature 6..15: note = DNA
  misc_feature 16..20: note = RNA
acggtccggcagatgagaag

SEQ ID NO: 577 - DNA, 20 bp, synthetic construct
  source 1..20: mol_type = other DNA
  modified_base 1: mod_base = OTHER; note = 2'-O-methoxyethyl guanosine
  modified_base 2: mod_base = OTHER; note = 2'-O-methoxyethyl guanosine
  modified_base 3: mod_base = OTHER; note = 2'-O-methoxyethyl thymidine
  modified_base 4: mod_base = OTHER; note = 2'-O-methoxyethyl 5-methylcytidine
  modified_base 5: mod_base = OTHER; note = 2'-O-methoxyethyl 5-methylcytidine
  modified_base 8: mod_base = OTHER; note = 2'-deoxy 5-methylcytidine
  modified_base 16: mod_base = OTHER; note = 2'-O-methoxyethyl adenosine
  modified_base 17: mod_base = OTHER; note = 2'-O-methoxyethyl adenosine
  modified_base 18: mod_base = OTHER; note = 2'-O-methoxyethyl guanosine
  modified_base 19: mod_base = OTHER; note = 2'-O-methoxyethyl guanosine
  modified_base 20: mod_base = OTHER; note = 2'-O-methoxyethyl 5-methylcytidine
  misc_feature 1..5: note = RNA
  misc_feature 6..15: note = DNA
  misc_feature 16..20: note = RNA
ggtccggcagatgagaaggc

SEQ ID NO: 578 - DNA, 20 bp, synthetic construct
  source 1..20: mol_type = other DNA
  modified_base 1: mod_base = OTHER; note = 2'-O-methoxyethyl thymidine
  modified_base 2: mod_base = OTHER; note = 2'-O-methoxyethyl 5-methylcytidine
  modified_base 3: mod_base = OTHER; note = 2'-O-methoxyethyl 5-methylcytidine
  modified_base 4: mod_base = OTHER; note = 2'-O-methoxyethyl guanosine
  modified_base 5: mod_base = OTHER; note = 2'-O-methoxyethyl guanosine
  modified_base 6: mod_base = OTHER; note = 2'-deoxy 5-methylcytidine
  modified_base 16: mod_base = OTHER; note = 2'-O-methoxyethyl guanosine
  modified_base 17: mod_base = OTHER; note = 2'-O-methoxyethyl guanosine
  modified_base 18: mod_base = OTHER; note = 2'-O-methoxyethyl 5-methylcytidine
  modified_base 19: mod_base = OTHER; note = 2'-O-methoxyethyl adenosine
  modified_base 20: mod_base = OTHER; note = 2'-O-methoxyethyl 5-methylcytidine
  misc_feature 1..5: note = RNA
  misc_feature 6..15: note = DNA
  misc_feature 16..20: note = RNA
tccggcagatgagaaggcac

SEQ ID NO: 579 - DNA, 20 bp, synthetic construct
  source 1..20: mol_type = other DNA
  modified_base 1: mod_base = OTHER; note = 2'-O-methoxyethyl 5-methylcytidine
  modified_base 2: mod_base = OTHER; note = 2'-O-methoxyethyl guanosine
  modified_base 3: mod_base = OTHER; note = 2'-O-methoxyethyl guanosine
  modified_base 4: mod_base = OTHER; note = 2'-O-methoxyethyl 5-methylcytidine
  modified_base 5: mod_base = OTHER; note = 2'-O-methoxyethyl adenosine
  modified_base 16: mod_base = OTHER; note = 2'-O-methoxyethyl 5-methylcytidine
  modified_base 17: mod_base = OTHER; note = 2'-O-methoxyethyl adenosine
  modified_base 18: mod_base = OTHER; note = 2'-O-methoxyethyl 5-methylcytidine
  modified_base 19: mod_base = OTHER; note = 2'-O-methoxyethyl adenosine
  modified_base 20: mod_base = OTHER; note = 2'-O-methoxyethyl guanosine
  misc_feature 1..5: note = RNA
  misc_feature 6..15: note = DNA
  misc_feature 16..20: note = RNA
cggcagatgagaaggcacag

SEQ ID NO: 580 - DNA, 20 bp, synthetic construct
  source 1..20: mol_type = other DNA
  modified_base 1: mod_base = OTHER; note = 2'-O-methoxyethyl guanosine
  modified_base 2: mod_base = OTHER; note = 2'-O-methoxyethyl 5-methylcytidine
  modified_base 3: mod_base = OTHER; note = 2'-O-methoxyethyl adenosine
  modified_base 4: mod_base = OTHER; note = 2'-O-methoxyethyl guanosine
  modified_base 5: mod_base = OTHER; note = 2'-O-methoxyethyl adenosine
  modified_base 14: mod_base = OTHER; note = 2'-deoxy 5-methylcytidine
  modified_base 16: mod_base = OTHER; note = 2'-O-methoxyethyl 5-methylcytidine
  modified_base 17: mod_base = OTHER; note = 2'-O-methoxyethyl adenosine
  modified_base 18: mod_base = OTHER; note = 2'-O-methoxyethyl guanosine
  modified_base 19: mod_base = OTHER; note = 2'-O-methoxyethyl adenosine
  modified_base 20: mod_base = OTHER; note = 2'-O-methoxyethyl 5-methylcytidine
  misc_feature 1..5: note = RNA
  misc_feature 6..15: note = DNA
  misc_feature 16..20: note = RNA
gcagatgagaaggcacagac

SEQ ID NO: 581 - DNA, 20 bp, synthetic construct
  source 1..20: mol_type = other DNA
  modified_base 1: mod_base = OTHER; note = 2'-O-methoxyethyl adenosine
  modified_base 2: mod_base = OTHER; note = 2'-O-methoxyethyl guanosine
  modified_base 3: mod_base = OTHER; note = 2'-O-methoxyethyl adenosine
  modified_base 4: mod_base = OTHER; note = 2'-O-methoxyethyl thymidine
  modified_base 5: mod_base = OTHER; note = 2'-O-methoxyethyl guanosine
  modified_base 12: mod_base = OTHER; note = 2'-deoxy 5-methylcytidine
  modified_base 14: mod_base = OTHER; note = 2'-deoxy 5-methylcytidine
  modified_base 16: mod_base = OTHER; note = 2'-O-methoxyethyl guanosine
  modified_base 17: mod_base = OTHER; note = 2'-O-methoxyethyl adenosine
  modified_base 18: mod_base = OTHER; note = 2'-O-methoxyethyl 5-methylcytidine
  modified_base 19: mod_base = OTHER; note = 2'-O-methoxyethyl guanosine
  modified_base 20: mod_base = OTHER; note = 2'-O-methoxyethyl guanosine
  misc_feature 1..5: note = RNA
  misc_feature 6..15: note = DNA
  misc_feature 16..20: note = RNA
agatgagaaggcacagacgg

SEQ ID NO: 582 - DNA, 20 bp, synthetic construct
  source 1..20: mol_type = other DNA
  modified_base 1: mod_base = OTHER; note = 2'-O-methoxyethyl adenosine
  modified_base 2: mod_base = OTHER; note = 2'-O-methoxyethyl thymidine
  modified_base 3: mod_base = OTHER; note = 2'-O-methoxyethyl guanosine
  modified_base 4: mod_base = OTHER; note = 2'-O-methoxyethyl adenosine
  modified_base 5: mod_base = OTHER; note = 2'-O-methoxyethyl guanosine
  modified_base 10: mod_base = OTHER; note = 2'-deoxy 5-methylcytidine
  modified_base 12: mod_base = OTHER; note = 2'-deoxy 5-methylcytidine
  modified_base 16: mod_base = OTHER; note = 2'-O-methoxyethyl 5-methylcytidine
  modified_base 17: mod_base = OTHER; note = 2'-O-methoxyethyl guanosine
  modified_base 18: mod_base = OTHER; note = 2'-O-methoxyethyl guanosine
  modified_base 19: mod_base = OTHER; note = 2'-O-methoxyethyl guanosine
  modified_base 20: mod_base = OTHER; note = 2'-O-methoxyethyl guanosine
  misc_feature 1..5: note = RNA
  misc_feature 6..15: note = DNA
  misc_feature 16..20: note = RNA
atgagaaggcacagacgggg

SEQ ID NO: 583 - DNA, 20 bp, synthetic construct
  source 1..20: mol_type = other DNA
  modified_base 1: mod_base = OTHER; note = 2'-O-methoxyethyl guanosine
  modified_base 2: mod_base = OTHER; note = 2'-O-methoxyethyl adenosine
  modified_base 3: mod_base = OTHER; note = 2'-O-methoxyethyl guanosine
  modified_base 4: mod_base = OTHER; note = 2'-O-methoxyethyl adenosine
  modified_base 5: mod_base = OTHER; note = 2'-O-methoxyethyl adenosine
  modified_base 8: mod_base = OTHER; note = 2'-deoxy 5-methylcytidine
  modified_base 10: mod_base = OTHER; note = 2'-deoxy 5-methylcytidine
  modified_base 14: mod_base = OTHER; note = 2'-deoxy 5-methylcytidine
  modified_base 16: mod_base = OTHER; note = 2'-O-methoxyethyl guanosine
  modified_base 17: mod_base = OTHER; note = 2'-O-methoxyethyl guanosine
  modified_base 18: mod_base = OTHER; note = 2'-O-methoxyethyl guanosine
  modified_base 19: mod_base = OTHER; note = 2'-O-methoxyethyl adenosine
  modified_base 20: mod_base = OTHER; note = 2'-O-methoxyethyl guanosine
  misc_feature 1..5: note = RNA
  misc_feature 6..15: note = DNA
  misc_feature 16..20: note = RNA
gagaaggcacagacggggag

SEQ ID NO: 584 - DNA, 20 bp, synthetic construct
  source 1..20: mol_type = other DNA
  modified_base 1: mod_base = OTHER; note = 2'-O-methoxyethyl guanosine
  modified_base 2: mod_base = OTHER; note = 2'-O-methoxyethyl adenosine
  modified_base 3: mod_base = OTHER; note = 2'-O-methoxyethyl adenosine
  modified_base 4: mod_base = OTHER; note = 2'-O-methoxyethyl guanosine
  modified_base 5: mod_base = OTHER; note = 2'-O-methoxyethyl guanosine
  modified_base 6: mod_base = OTHER; note = 2'-deoxy 5-methylcytidine
  modified_base 8: mod_base = OTHER; note = 2'-deoxy 5-methylcytidine
  modified_base 12: mod_base = OTHER; note = 2'-deoxy 5-methylcytidine
  modified_base 16: mod_base = OTHER; note = 2'-O-methoxyethyl guanosine
  modified_base 17: mod_base = OTHER; note = 2'-O-methoxyethyl adenosine
  modified_base 18: mod_base = OTHER; note = 2'-O-methoxyethyl guanosine
  modified_base 19: mod_base = OTHER; note = 2'-O-methoxyethyl thymidine
  modified_base 20: mod_base = OTHER; note = 2'-O-methoxyethyl 5-methylcytidine
  misc_feature 1..5: note = RNA
  misc_feature 6..15: note = DNA
  misc_feature 16..20: note = RNA
gaaggcacagacggggagtc

SEQ ID NO: 585 - DNA, 20 bp, synthetic construct
  source 1..20: mol_type = other DNA
  modified_base 1: mod_base = OTHER; note = 2'-O-methoxyethyl adenosine
  modified_base 2: mod_base = OTHER; note = 2'-O-methoxyethyl guanosine
  modified_base 3: mod_base = OTHER; note = 2'-O-methoxyethyl guanosine
  modified_base 4: mod_base = OTHER; note = 2'-O-methoxyethyl 5-methylcytidine
  modified_base 5: mod_base = OTHER; note = 2'-O-methoxyethyl adenosine
  modified_base 6: mod_base = OTHER; note = 2'-deoxy 5-methylcytidine
  modified_base 10: mod_base = OTHER; note = 2'-deoxy 5-methylcytidine
  modified_base 16: mod_base = OTHER; note = 2'-O-methoxyethyl guanosine
  modified_base 17: mod_base = OTHER; note = 2'-O-methoxyethyl thymidine
  modified_base 18: mod_base = OTHER; note = 2'-O-methoxyethyl 5-methylcytidine
  modified_base 19: mod_base = OTHER; note = 2'-O-methoxyethyl 5-methylcytidine
  modified_base 20: mod_base = OTHER; note = 2'-O-methoxyethyl guanosine
  misc_feature 1..5: note = RNA
  misc_feature 6..15: note = DNA
  misc_feature 16..20: note = RNA
aggcacagacggggagtccg

SEQ ID NO: 586 - DNA, 20 bp, synthetic construct
  source 1..20: mol_type = other DNA
  modified_base 1: mod_base = OTHER; note = 2'-O-methoxyethyl guanosine
  modified_base 2: mod_base = OTHER; note = 2'-O-methoxyethyl 5-methylcytidine
  modified_base 3: mod_base = OTHER; note = 2'-O-methoxyethyl adenosine
  modified_base 4: mod_base = OTHER; note = 2'-O-methoxyethyl 5-methylcytidine
  modified_base 5: mod_base = OTHER; note = 2'-O-methoxyethyl adenosine
  modified_base 8: mod_base = OTHER; note = 2'-deoxy 5-methylcytidine
  modified_base 16: mod_base = OTHER; note = 2'-O-methoxyethyl 5-methylcytidine
  modified_base 17: mod_base = OTHER; note = 2'-O-methoxyethyl 5-methylcytidine
  modified_base 18: mod_base = OTHER; note = 2'-O-methoxyethyl guanosine
  modified_base 19: mod_base = OTHER; note = 2'-O-methoxyethyl 5-methylcytidine
  modified_base 20: mod_base = OTHER; note = 2'-O-methoxyethyl guanosine
  misc_feature 1..5: note = RNA
  misc_feature 6..15: note = DNA
  misc_feature 16..20: note = RNA
gcacagacggggagtccgcg

SEQ ID NO: 587 - DNA, 20 bp, synthetic construct
  source 1..20: mol_type = other DNA
  modified_base 1: mod_base = OTHER; note = 2'-O-methoxyethyl adenosine
  modified_base 2: mod_base = OTHER; note = 2'-O-methoxyethyl 5-methylcytidine
  modified_base 3: mod_base = OTHER; note = 2'-O-methoxyethyl adenosine
  modified_base 4: mod_base = OTHER; note = 2'-O-methoxyethyl guanosine
  modified_base 5: mod_base = OTHER; note = 2'-O-methoxyethyl adenosine
  modified_base 6: mod_base = OTHER; note = 2'-deoxy 5-methylcytidine
  modified_base 14: mod_base = OTHER; note = 2'-deoxy 5-methylcytidine
  modified_base 15: mod_base = OTHER; note = 2'-deoxy 5-methylcytidine
  modified_base 16: mod_base = OTHER; note = 2'-O-methoxyethyl guanosine
  modified_base 17: mod_base = OTHER; note = 2'-O-methoxyethyl 5-methylcytidine
  modified_base 18: mod_base = OTHER; note = 2'-O-methoxyethyl guanosine
  modified_base 19: mod_base = OTHER; note = 2'-O-methoxyethyl thymidine
  modified_base 20: mod_base = OTHER; note = 2'-O-methoxyethyl adenosine
  misc_feature 1..5: note = RNA
  misc_feature 6..15: note = DNA
  misc_feature 16..20: note = RNA
acagacggggagtccgcgta

SEQ ID NO: 588 - DNA, 20 bp, synthetic construct
  source 1..20: mol_type = other DNA
  modified_base 1: mod_base = OTHER; note = 2'-O-methoxyethyl adenosine
  modified_base 2: mod_base = OTHER; note = 2'-O-methoxyethyl guanosine
  modified_base 3: mod_base = OTHER; note = 2'-O-methoxyethyl adenosine
  modified_base 4: mod_base = OTHER; note = 2'-O-methoxyethyl 5-methylcytidine
  modified_base 5: mod_base = OTHER; note = 2'-O-methoxyethyl guanosine
  modified_base 12: mod_base = OTHER; note = 2'-deoxy 5-methylcytidine
  modified_base 13: mod_base = OTHER; note = 2'-deoxy 5-methylcytidine
  modified_base 15: mod_base = OTHER; note = 2'-deoxy 5-methylcytidine
  modified_base 16: mod_base = OTHER; note = 2'-O-methoxyethyl guanosine
  modified_base 17: mod_base = OTHER; note = 2'-O-methoxyethyl thymidine
  modified_base 18: mod_base = OTHER; note = 2'-O-methoxyethyl adenosine
  modified_base 19: mod_base = OTHER; note = 2'-O-methoxyethyl adenosine
  modified_base 20: mod_base = OTHER; note = 2'-O-methoxyethyl adenosine
  misc_feature 1..5: note = RNA
  misc_feature 6..15: note = DNA
  misc_feature 16..20: note = RNA
agacggggagtccgcgtaaa

SEQ ID NO: 589 - DNA, 20 bp, synthetic construct
  source 1..20: mol_type = other DNA
  modified_base 1: mod_base = OTHER; note = 2'-O-methoxyethyl adenosine
  modified_base 2: mod_base = OTHER; note = 2'-O-methoxyethyl 5-methylcytidine
  modified_base 3: mod_base = OTHER; note = 2'-O-methoxyethyl guanosine
  modified_base 4: mod_base = OTHER; note = 2'-O-methoxyethyl guanosine
  modified_base 5: mod_base = OTHER; note = 2'-O-methoxyethyl guanosine
  modified_base 10: mod_base = OTHER; note = 2'-deoxy 5-methylcytidine
  modified_base 11: mod_base = OTHER; note = 2'-deoxy 5-methylcytidine
  modified_base 13: mod_base = OTHER; note = 2'-deoxy 5-methylcytidine
  modified_base 16: mod_base = OTHER; note = 2'-O-methoxyethyl adenosine
  modified_base 17: mod_base = OTHER; note = 2'-O-methoxyethyl adenosine
  modified_base 18: mod_base = OTHER; note = 2'-O-methoxyethyl adenosine
  modified_base 19: mod_base = OTHER; note = 2'-O-methoxyethyl guanosine
  modified_base 20: mod_base = OTHER; note = 2'-O-methoxyethyl adenosine
  misc_feature 1..5: note = RNA
  misc_feature 6..15: note = DNA
  misc_feature 16..20: note = RNA
acggggagtccgcgtaaaga

SEQ ID NO: 590 - DNA, 20 bp, synthetic construct
  source 1..20: mol_type = other DNA
  modified_base 1: mod_base = OTHER; note = 2'-O-methoxyethyl guanosine
  modified_base 2: mod_base = OTHER; note = 2'-O-methoxyethyl guanosine
  modified_base 3: mod_base = OTHER; note = 2'-O-methoxyethyl guanosine
  modified_base 4: mod_base = OTHER; note = 2'-O-methoxyethyl guanosine
  modified_base 5: mod_base = OTHER; note = 2'-O-methoxyethyl adenosine
  modified_base 8: mod_base = OTHER; note = 2'-deoxy 5-methylcytidine
  modified_base 9: mod_base = OTHER; note = 2'-deoxy 5-methylcytidine
  modified_base 11: mod_base = OTHER; note = 2'-deoxy 5-methylcytidine
  modified_base 16: mod_base = OTHER; note = 2'-O-methoxyethyl adenosine
  modified_base 17: mod_base = OTHER; note = 2'-O-methoxyethyl guanosine
  modified_base 18: mod_base = OTHER; note = 2'-O-methoxyethyl adenosine
  modified_base 19: mod_base = OTHER; note = 2'-O-methoxyethyl guanosine
  modified_base 20: mod_base = OTHER; note = 2'-O-methoxyethyl adenosine
  misc_feature 1..5: note = RNA
  misc_feature 6..15: note = DNA
  misc_feature 16..20: note = RNA
ggggagtccgcgtaaagaga

SEQ ID NO: 591 - DNA, 20 bp, synthetic construct
  source 1..20: mol_type = other DNA
  modified_base 1: mod_base = OTHER; note = 2'-O-methoxyethyl guanosine
  modified_base 2: mod_base = OTHER; note = 2'-O-methoxyethyl guanosine
  modified_base 3: mod_base = OTHER; note = 2'-O-methoxyethyl adenosine
  modified_base 4: mod_base = OTHER; note = 2'-O-methoxyethyl guanosine
  modified_base 5: mod_base = OTHER; note = 2'-O-methoxyethyl thymidine
  modified_base 6: mod_base = OTHER; note = 2'-deoxy 5-methylcytidine
  modified_base 7: mod_base = OTHER; note = 2'-deoxy 5-methylcytidine
  modified_base 9: mod_base = OTHER; note = 2'-deoxy 5-methylcytidine
  modified_base 16: mod_base = OTHER; note = 2'-O-methoxyethyl adenosine
  modified_base 17: mod_base = OTHER; note = 2'-O-methoxyethyl guanosine
  modified_base 18: mod_base = OTHER; note = 2'-O-methoxyethyl adenosine
  modified_base 19: mod_base = OTHER; note = 2'-O-methoxyethyl guanosine
  modified_base 20: mod_base = OTHER; note = 2'-O-methoxyethyl guanosine
  misc_feature 1..5: note = RNA
  misc_feature 6..15: note = DNA
  misc_feature 16..20: note = RNA
ggagtccgcgtaaagagagg

SEQ ID NO: 592 - DNA, 20 bp, synthetic construct
  source 1..20: mol_type = other DNA
  modified_base 1: mod_base = OTHER; note = 2'-O-methoxyethyl guanosine
  modified_base 2: mod_base = OTHER; note = 2'-O-methoxyethyl guanosine
  modified_base 3: mod_base = OTHER; note = 2'-O-methoxyethyl thymidine
  modified_base 4: mod_base = OTHER; note = 2'-O-methoxyethyl 5-methylcytidine
  modified_base 5: mod_base = OTHER; note = 2'-O-methoxyethyl guanosine
  modified_base 7: mod_base = OTHER; note = 2'-deoxy 5-methylcytidine
  modified_base 8: mod_base = OTHER; note = 2'-deoxy 5-methylcytidine
  modified_base 10: mod_base = OTHER; note = 2'-deoxy 5-methylcytidine
  modified_base 16: mod_base = OTHER; note = 2'-O-methoxyethyl thymidine
  modified_base 17: mod_base = OTHER; note = 2'-O-methoxyethyl 5-methylcytidine
  modified_base 18: mod_base = OTHER; note = 2'-O-methoxyethyl adenosine
  modified_base 19: mod_base = OTHER; note = 2'-O-methoxyethyl guanosine
  modified_base 20: mod_base = OTHER; note = 2'-O-methoxyethyl 5-methylcytidine
  misc_feature 1..5: note = RNA
  misc_feature 6..15: note = DNA
  misc_feature 16..20: note = RNA
ggtcgtccgcaggattcagc

SEQ ID NO: 593 - DNA, 20 bp, synthetic construct
  source 1..20: mol_type = other DNA
  modified_base 1: mod_base = OTHER; note = 2'-O-methoxyethyl guanosine
  modified_base 2: mod_base = OTHER; note = 2'-O-methoxyethyl thymidine
  modified_base 3: mod_base = OTHER; note = 2'-O-methoxyethyl 5-methylcytidine
  modified_base 4: mod_base = OTHER; note = 2'-O-methoxyethyl guanosine
  modified_base 5: mod_base = OTHER; note = 2'-O-methoxyethyl thymidine
  modified_base 6: mod_base = OTHER; note = 2'-deoxy 5-methylcytidine
  modified_base 7: mod_base = OTHER; note = 2'-deoxy 5-methylcytidine
  modified_base 9: mod_base = OTHER; note = 2'-deoxy 5-methylcytidine
  modified_base 16: mod_base = OTHER; note = 2'-O-methoxyethyl 5-methylcytidine
  modified_base 17: mod_base = OTHER; note = 2'-O-methoxyethyl adenosine
  modified_base 18: mod_base = OTHER; note = 2'-O-methoxyethyl guanosine
  modified_base 19: mod_base = OTHER; note = 2'-O-methoxyethyl 5-methylcytidine
  modified_base 20: mod_base = OTHER; note = 2'-O-methoxyethyl guanosine
  misc_feature 1..5: note = RNA
  misc_feature 6..15: note = DNA
  misc_feature 16..20: note = RNA
gtcgtccgcaggattcagcg

SEQ ID NO: 594 - DNA, 20 bp, synthetic construct
  source 1..20: mol_type = other DNA
  modified_base 1: mod_base = OTHER; note = 2'-O-methoxyethyl thymidine
  modified_base 2: mod_base = OTHER; note = 2'-O-methoxyethyl 5-methylcytidine
  modified_base 3: mod_base = OTHER; note = 2'-O-methoxyethyl guanosine
  modified_base 4: mod_base = OTHER; note = 2'-O-methoxyethyl thymidine
  modified_base 5: mod_base = OTHER; note = 2'-O-methoxyethyl 5-methylcytidine
  modified_base 6: mod_base = OTHER; note = 2'-deoxy 5-methylcytidine
  modified_base 8: mod_base = OTHER; note = 2'-deoxy 5-methylcytidine
  modified_base 15: mod_base = OTHER; note = 2'-deoxy 5-methylcytidine
  modified_base 16: mod_base = OTHER; note = 2'-O-methoxyethyl adenosine
  modified_base 17: mod_base = OTHER; note = 2'-O-methoxyethyl guanosine
  modified_base 18: mod_base = OTHER; note = 2'-O-methoxyethyl 5-methylcytidine
  modified_base 19: mod_base = OTHER; note = 2'-O-methoxyethyl guanosine
  modified_base 20: mod_base = OTHER; note = 2'-O-methoxyethyl 5-methylcytidine
  misc_feature 1..5: note = RNA
  misc_feature 6..15: note = DNA
  misc_feature 16..20: note = RNA
tcgtccgcaggattcagcgc

SEQ ID NO: 595 - DNA, 20 bp, synthetic construct
  source 1..20: mol_type = other DNA
  modified_base 1: mod_base = OTHER; note = 2'-O-methoxyethyl 5-methylcytidine
  modified_base 2: mod_base = OTHER; note = 2'-O-methoxyethyl guanosine
  modified_base 3: mod_base = OTHER; note = 2'-O-methoxyethyl thymidine
  modified_base 4: mod_base = OTHER; note = 2'-O-methoxyethyl 5-methylcytidine
  modified_base 5: mod_base = OTHER; note = 2'-O-methoxyethyl 5-methylcytidine
  modified_base 7: mod_base = OTHER; note = 2'-deoxy 5-methylcytidine
  modified_base 14: mod_base = OTHER; note = 2'-deoxy 5-methylcytidine
  modified_base 16: mod_base = OTHER; note = 2'-O-methoxyethyl guanosine
  modified_base 17: mod_base = OTHER; note = 2'-O-methoxyethyl 5-methylcytidine
  modified_base 18: mod_base = OTHER; note = 2'-O-methoxyethyl guanosine
  modified_base 19: mod_base = OTHER; note = 2'-O-methoxyethyl 5-methylcytidine
  modified_base 20: mod_base = OTHER; note = 2'-O-methoxyethyl 5-methylcytidine
  misc_feature 1..5: note = RNA
  misc_feature 6..15: note = DNA
  misc_feature 16..20: note = RNA
cgtccgcaggattcagcgcc

SEQ ID NO: 596 - DNA, 20 bp, synthetic construct
  source 1..20: mol_type = other DNA
  modified_base 1: mod_base = OTHER; note = 2'-O-methoxyethyl guanosine
  modified_base 2: mod_base = OTHER; note = 2'-O-methoxyethyl thymidine
  modified_base 3: mod_base = OTHER; note = 2'-O-methoxyethyl 5-methylcytidine
  modified_base 4: mod_base = OTHER; note = 2'-O-methoxyethyl 5-methylcytidine
  modified_base 5: mod_base = OTHER; note = 2'-O-methoxyethyl guanosine
  modified_base 6: mod_base = OTHER; note = 2'-deoxy 5-methylcytidine
  modified_base 13: mod_base = OTHER; note = 2'-deoxy 5-methylcytidine
  modified_base 16: mod_base = OTHER; note = 2'-O-methoxyethyl 5-methylcytidine
  modified_base 17: mod_base = OTHER; note = 2'-O-methoxyethyl guanosine
  modified_base 18: mod_base = OTHER; note = 2'-O-methoxyethyl 5-methylcytidine
  modified_base 19: mod_base = OTHER; note = 2'-O-methoxyethyl 5-methylcytidine
  modified_base 20: mod_base = OTHER; note = 2'-O-methoxyethyl guanosine
  misc_feature 1..5: note = RNA
  misc_feature 6..15: note = DNA
  misc_feature 16..20: note = RNA
gtccgcaggattcagcgccg

SEQ ID NO: 597 - DNA, 20 bp, synthetic construct
  source 1..20: mol_type = other DNA
  modified_base 1: mod_base = OTHER; note = 2'-O-methoxyethyl thymidine
  modified_base 2: mod_base = OTHER; note = 2'-O-methoxyethyl 5-methylcytidine
  modified_base 3: mod_base = OTHER; note = 2'-O-methoxyethyl 5-methylcytidine
  modified_base 4: mod_base = OTHER; note = 2'-O-methoxyethyl guanosine
  modified_base 5: mod_base = OTHER; note = 2'-O-methoxyethyl 5-methylcytidine
  modified_base 12: mod_base = OTHER; note = 2'-deoxy 5-methylcytidine
  modified_base 15: mod_base = OTHER; note = 2'-deoxy 5-methylcytidine
  modified_base 16: mod_base = OTHER; note = 2'-O-methoxyethyl guanosine
  modified_base 17: mod_base = OTHER; note = 2'-O-methoxyethyl 5-methylcytidine
  modified_base 18: mod_base = OTHER; note = 2'-O-methoxyethyl 5-methylcytidine
  modified_base 19: mod_base = OTHER; note = 2'-O-methoxyethyl guanosine
  modified_base 20: mod_base = OTHER; note = 2'-O-methoxyethyl adenosine
  misc_feature 1..5: note = RNA
  misc_feature 6..15: note = DNA
  misc_feature 16..20: note = RNA
tccgcaggattcagcgccga

SEQ ID NO: 598 - DNA, 20 bp, synthetic construct
  source 1..20: mol_type = other DNA
  modified_base 1: mod_base = OTHER; note = 2'-O-methoxyethyl 5-methylcytidine
  modified_base 2: mod_base = OTHER; note = 2'-O-methoxyethyl 5-methylcytidine
  modified_base 3: mod_base = OTHER; note = 2'-O-methoxyethyl guanosine
  modified_base 4: mod_base = OTHER; note = 2'-O-methoxyethyl 5-methylcytidine
  modified_base 5: mod_base = OTHER; note = 2'-O-methoxyethyl adenosine
  modified_base 11: mod_base = OTHER; note = 2'-deoxy 5-methylcytidine
  modified_base 14: mod_base = OTHER; note = 2'-deoxy 5-methylcytidine
  modified_base 16: mod_base = OTHER; note = 2'-O-methoxyethyl 5-methylcytidine
  modified_base 17: mod_base = OTHER; note = 2'-O-methoxyethyl 5-methylcytidine
  modified_base 18: mod_base = OTHER; note = 2'-O-methoxyethyl guanosine
  modified_base 19: mod_base = OTHER; note = 2'-O-methoxyethyl adenosine
  modified_base 20: mod_base = OTHER; note = 2'-O-methoxyethyl 5-methylcytidine
  misc_feature 1..5: note = RNA
  misc_feature 6..15: note = DNA
  misc_feature 16..20: note = RNA
ccgcaggattcagcgccgac

SEQ ID NO: 599 - DNA, 20 bp, synthetic construct
  source 1..20: mol_type = other DNA
  modified_base 1: mod_base = OTHER; note = 2'-O-methoxyethyl 5-methylcytidine
  modified_base 2: mod_base = OTHER; note = 2'-O-methoxyethyl guanosine
  modified_base 3: mod_base = OTHER; note = 2'-O-methoxyethyl 5-methylcytidine
  modified_base 4: mod_base = OTHER; note = 2'-O-methoxyethyl adenosine
  modified_base 5: mod_base = OTHER; note = 2'-O-methoxyethyl guanosine
  modified_base 10: mod_base = OTHER; note = 2'-deoxy 5-methylcytidine
  modified_base 13: mod_base = OTHER; note = 2'-deoxy 5-methylcytidine
  modified_base 15: mod_base = OTHER; note = 2'-deoxy 5-methylcytidine
  modified_base 16: mod_base = OTHER; note = 2'-O-methoxyethyl 5-methylcytidine
  modified_base 17: mod_base = OTHER; note = 2'-O-methoxyethyl guanosine
  modified_base 18: mod_base = OTHER; note = 2'-O-methoxyethyl adenosine
  modified_base 19: mod_base = OTHER; note = 2'-O-methoxyethyl 5-methylcytidine
  modified_base 20: mod_base = OTHER; note = 2'-O-methoxyethyl guanosine
  misc_feature 1..5: note = RNA
  misc_feature 6..15: note = DNA
  misc_feature 16..20: note = RNA
cgcaggattcagcgccgacg

SEQ ID NO: 600 - DNA, 20 bp, synthetic construct
  source 1..20: mol_type = other DNA
  modified_base 1: mod_base = OTHER; note = 2'-O-methoxyethyl guanosine
  modified_base 2: mod_base = OTHER; note = 2'-O-methoxyethyl 5-methylcytidine
  modified_base 3: mod_base = OTHER; note = 2'-O-methoxyethyl adenosine
  modified_base 4: mod_base = OTHER; note = 2'-O-methoxyethyl guanosine
  modified_base 5: mod_base = OTHER; note = 2'-O-methoxyethyl guanosine
  modified_base 9: mod_base = OTHER; note = 2'-deoxy 5-methylcytidine
  modified_base 12: mod_base = OTHER; note = 2'-deoxy 5-methylcytidine
  modified_base 14: mod_base = OTHER; note = 2'-deoxy 5-methylcytidine
  modified_base 15: mod_base = OTHER; note = 2'-deoxy 5-methylcytidine
  modified_base 16: mod_base = OTHER; note = 2'-O-methoxyethyl guanosine
  modified_base 17: mod_base = OTHER; note = 2'-O-methoxyethyl adenosine
  modified_base 18: mod_base = OTHER; note = 2'-O-methoxyethyl 5-methylcytidine
  modified_base 19: mod_base = OTHER; note = 2'-O-methoxyethyl guanosine
  modified_base 20: mod_base = OTHER; note = 2'-O-methoxyethyl guanosine
  misc_feature 1..5: note = RNA
  misc_feature 6..15: note = DNA
  misc_feature 16..20: note = RNA
gcaggattcagcgccgacgg

SEQ ID NO: 601 - DNA, 20 bp, synthetic construct
  source 1..20: mol_type = other DNA
  modified_base 1: mod_base = OTHER; note = 2'-O-methoxyethyl 5-methylcytidine
  modified_base 2: mod_base = OTHER; note = 2'-O-methoxyethyl adenosine
  modified_base 3: mod_base = OTHER; note = 2'-O-methoxyethyl guanosine
  modified_base 4: mod_base = OTHER; note = 2'-O-methoxyethyl guanosine
  modified_base 5: mod_base = OTHER; note = 2'-O-methoxyethyl adenosine
  modified_base 8: mod_base = OTHER; note = 2'-deoxy 5-methylcytidine
  modified_base 11: mod_base = OTHER; note = 2'-deoxy 5-methylcytidine
  modified_base 13: mod_base = OTHER; note = 2'-deoxy 5-methylcytidine
  modified_base 14: mod_base = OTHER; note = 2'-deoxy 5-methylcytidine
  modified_base 16: mod_base = OTHER; note = 2'-O-methoxyethyl adenosine
  modified_base 17: mod_base = OTHER; note = 2'-O-methoxyethyl 5-methylcytidine
  modified_base 18: mod_base = OTHER; note = 2'-O-methoxyethyl guanosine
  modified_base 19: mod_base = OTHER; note = 2'-O-methoxyethyl guanosine
  modified_base 20: mod_base = OTHER; note = 2'-O-methoxyethyl guanosine
  misc_feature 1..5: note = RNA
  misc_feature 6..15: note = DNA
  misc_feature 16..20: note = RNA
caggattcagcgccgacggg

SEQ ID NO: 602 - DNA, 20 bp, synthetic construct
  source 1..20: mol_type = other DNA
  modified_base 1: mod_base = OTHER; note = 2'-O-methoxyethyl adenosine
  modified_base 2: mod_base = OTHER; note = 2'-O-methoxyethyl guanosine
  modified_base 3: mod_base = OTHER; note = 2'-O-methoxyethyl guanosine
  modified_base 4: mod_base = OTHER; note = 2'-O-methoxyethyl adenosine
  modified_base 5: mod_base = OTHER; note = 2'-O-methoxyethyl thymidine
  modified_base 7: mod_base = OTHER; note = 2'-deoxy 5-methylcytidine
  modified_base 10: mod_base = OTHER; note = 2'-deoxy 5-methylcytidine
  modified_base 12: mod_base = OTHER; note = 2'-deoxy 5-methylcytidine
  modified_base 13: mod_base = OTHER; note = 2'-deoxy 5-methylcytidine
  modified_base 16: mod_base = OTHER; note = 2'-O-methoxyethyl 5-methylcytidine
  modified_base 17: mod_base = OTHER; note = 2'-O-methoxyethyl guanosine
  modified_base 18: mod_base = OTHER; note = 2'-O-methoxyethyl guanosine
  modified_base 19: mod_base = OTHER; note = 2'-O-methoxyethyl guanosine
  modified_base 20: mod_base = OTHER; note = 2'-O-methoxyethyl adenosine
  misc_feature 1..5: note = RNA
  misc_feature 6..15: note = DNA
  misc_feature 16..20: note = RNA
aggattcagcgccgacggga

SEQ ID NO: 603 - DNA, 20 bp, synthetic construct
  source 1..20: mol_type = other DNA
  modified_base 1: mod_base = OTHER; note = 2'-O-methoxyethyl guanosine
  modified_base 2: mod_base = OTHER; note = 2'-O-methoxyethyl adenosine
  modified_base 3: mod_base = OTHER; note = 2'-O-methoxyethyl thymidine
  modified_base 4: mod_base = OTHER; note = 2'-O-methoxyethyl thymidine
  modified_base 5: mod_base = OTHER; note = 2'-O-methoxyethyl 5-methylcytidine
  modified_base 8: mod_base = OTHER; note = 2'-deoxy 5-methylcytidine
  modified_base 10: mod_base = OTHER; note = 2'-deoxy 5-methylcytidine
  modified_base 11: mod_base = OTHER; note = 2'-deoxy 5-methylcytidine
  modified_base 14: mod_base = OTHER; note = 2'-deoxy 5-methylcytidine
  modified_base 16: mod_base = OTHER; note = 2'-O-methoxyethyl guanosine
  modified_base 17: mod_base = OTHER; note = 2'-O-methoxyethyl guanosine
  modified_base 18: mod_base = OTHER; note = 2'-O-methoxyethyl adenosine
  modified_base 19: mod_base = OTHER; note = 2'-O-methoxyethyl 5-methylcytidine
  modified_base 20: mod_base = OTHER; note = 2'-O-methoxyethyl guanosine
  misc_feature 1..5: note = RNA
  misc_feature 6..15: note = DNA
  misc_feature 16..20: note = RNA
gattcagcgccgacgggacg

SEQ ID NO: 604 - DNA, 20 bp, synthetic construct
  source 1..20: mol_type = other DNA
  modified_base 1: mod_base = OTHER; note = 2'-O-methoxyethyl adenosine
  modified_base 2: mod_base = OTHER; note = 2'-O-methoxyethyl thymidine
  modified_base 3: mod_base = OTHER; note = 2'-O-methoxyethyl thymidine
  modified_base 4: mod_base = OTHER; note = 2'-O-methoxyethyl 5-methylcytidine
  modified_base 5: mod_base = OTHER; note = 2'-O-methoxyethyl adenosine
  modified_base 7: mod_base = OTHER; note = 2'-deoxy 5-methylcytidine
  modified_base 9: mod_base = OTHER; note = 2'-deoxy 5-methylcytidine
  modified_base 10: mod_base = OTHER; note = 2'-deoxy 5-methylcytidine
  modified_base 13: mod_base = OTHER; note = 2'-deoxy 5-methylcytidine
  modified_base 16: mod_base = OTHER; note = 2'-O-methoxyethyl guanosine
  modified_base 17: mod_base = OTHER; note = 2'-O-methoxyethyl adenosine
  modified_base 18: mod_base = OTHER; note = 2'-O-methoxyethyl 5-methylcytidine
  modified_base 19: mod_base = OTHER; note = 2'-O-methoxyethyl guanosine
  modified_base 20: mod_base = OTHER; note = 2'-O-methoxyethyl thymidine
  misc_feature 1..5: note = RNA
  misc_feature 6..15: note = DNA
  misc_feature 16..20: note = RNA
attcagcgccgacgggacgt

SEQ ID NO: 605 - DNA, 20 bp, synthetic construct
  source 1..20: mol_type = other DNA
  modified_base 1: mod_base = OTHER; note = 2'-O-methoxyethyl thymidine
  modified_base 2: mod_base = OTHER; note = 2'-O-methoxyethyl thymidine
  modified_base 3: mod_base = OTHER; note = 2'-O-methoxyethyl 5-methylcytidine
  modified_base 4: mod_base = OTHER; note = 2'-O-methoxyethyl adenosine
  modified_base 5: mod_base = OTHER; note = 2'-O-methoxyethyl guanosine
  modified_base 6: mod_base = OTHER; note = 2'-deoxy 5-methylcytidine
  modified_base 8: mod_base = OTHER; note = 2'-deoxy 5-methylcytidine
  modified_base 9: mod_base = OTHER; note = 2'-deoxy 5-methylcytidine
  modified_base 12: mod_base = OTHER; note = 2'-deoxy 5-methylcytidine
  modified_base 16: mod_base = OTHER; note = 2'-O-methoxyethyl adenosine
  modified_base 17: mod_base = OTHER; note = 2'-O-methoxyethyl 5-methylcytidine
  modified_base 18: mod_base = OTHER; note = 2'-O-methoxyethyl guanosine
  modified_base 19: mod_base = OTHER; note = 2'-O-methoxyethyl thymidine
  modified_base 20: mod_base = OTHER; note = 2'-O-methoxyethyl adenosine
  misc_feature 1..5: note = RNA
  misc_feature 6..15: note = DNA
  misc_feature 16..20: note = RNA
ttcagcgccgacgggacgta

SEQ ID NO: 606 - DNA, 20 bp, synthetic construct
  source 1..20: mol_type = other DNA
  modified_base 1: mod_base = OTHER; note = 2'-O-methoxyethyl thymidine
  modified_base 2: mod_base = OTHER; note = 2'-O-methoxyethyl 5-methylcytidine
  modified_base 3: mod_base = OTHER; note = 2'-O-methoxyethyl adenosine
  modified_base 4: mod_base = OTHER; note = 2'-O-methoxyethyl guanosine
  modified_base 5: mod_base = OTHER; note = 2'-O-methoxyethyl 5-methylcytidine
  modified_base 7: mod_base = OTHER; note = 2'-deoxy 5-methylcytidine
  modified_base 8: mod_base = OTHER; note = 2'-deoxy 5-methylcytidine
  modified_base 11: mod_base = OTHER; note = 2'-deoxy 5-methylcytidine
  modified_base 16: mod_base = OTHER; note = 2'-O-methoxyethyl 5-methylcytidine
  modified_base 17: mod_base = OTHER; note = 2'-O-methoxyethyl guanosine
  modified_base 18: mod_base = OTHER; note = 2'-O-methoxyethyl thymidine
  modified_base 19: mod_base = OTHER; note = 2'-O-methoxyethyl adenosine
  modified_base 20: mod_base = OTHER; note = 2'-O-methoxyethyl adenosine
  misc_feature 1..5: note = RNA
  misc_feature 6..15: note = DNA
  misc_feature 16..20: note = RNA
tcagcgccgacgggacgtaa

SEQ ID NO: 607 - DNA, 20 bp, synthetic construct
  source 1..20: mol_type = other DNA
  modified_base 1: mod_base = OTHER; note = 2'-O-methoxyethyl 5-methylcytidine
  modified_base 2: mod_base = OTHER; note = 2'-O-methoxyethyl adenosine
  modified_base 3: mod_base = OTHER; note = 2'-O-methoxyethyl guanosine
  modified_base 4: mod_base = OTHER; note = 2'-O-methoxyethyl 5-methylcytidine
  modified_base 5: mod_base = OTHER; note = 2'-O-methoxyethyl guanosine
  modified_base 6: mod_base = OTHER; note = 2'-deoxy 5-methylcytidine
  modified_base 7: mod_base = OTHER; note = 2'-deoxy 5-methylcytidine
  modified_base 10: mod_base = OTHER; note = 2'-deoxy 5-methylcytidine
  modified_base 15: mod_base = OTHER; note = 2'-deoxy 5-methylcytidine
  modified_base 16: mod_base = OTHER; note = 2'-O-methoxyethyl guanosine
  modified_base 17: mod_base = OTHER; note = 2'-O-methoxyethyl thymidine
  modified_base 18: mod_base = OTHER; note = 2'-O-methoxyethyl adenosine
  modified_base 19: mod_base = OTHER; note = 2'-O-methoxyethyl adenosine
  modified_base 20: mod_base = OTHER; note = 2'-O-methoxyethyl adenosine
  misc_feature 1..5: note = RNA
  misc_feature 6..15: note = DNA
  misc_feature 16..20: note = RNA
cagcgccgacgggacgtaaa

SEQ ID NO: 608 - DNA, 20 bp, synthetic construct
  source 1..20: mol_type = other DNA
  modified_base 1: mod_base = OTHER; note = 2'-O-methoxyethyl adenosine
  modified_base 2: mod_base = OTHER; note = 2'-O-methoxyethyl guanosine
  modified_base 3: mod_base = OTHER; note = 2'-O-methoxyethyl 5-methylcytidine
  modified_base 4: mod_base = OTHER; note = 2'-O-methoxyethyl guanosine
  modified_base 5: mod_base = OTHER; note = 2'-O-methoxyethyl 5-methylcytidine
  modified_base 6: mod_base = OTHER; note = 2'-deoxy 5-methylcytidine
  modified_base 9: mod_base = OTHER; note = 2'-deoxy 5-methylcytidine
  modified_base 14: mod_base = OTHER; note = 2'-deoxy 5-methylcytidine
  modified_base 16: mod_base = OTHER; note = 2'-O-methoxyethyl thymidine
  modified_base 17: mod_base = OTHER; note = 2'-O-methoxyethyl adenosine
  modified_base 18: mod_base = OTHER; note = 2'-O-methoxyethyl adenosine
  modified_base 19: mod_base = OTHER; note = 2'-O-methoxyethyl adenosine
  modified_base 20: mod_base = OTHER; note = 2'-O-methoxyethyl 5-methylcytidine
  misc_feature 1..5: note = RNA
  misc_feature 6..15: note = DNA
  misc_feature 16..20: note = RNA
agcgccgacgggacgtaaac

SEQ ID NO: 609 - DNA, 20 bp, synthetic construct
  source 1..20: mol_type = other DNA
  modified_base 1: mod_base = OTHER; note = 2'-O-methoxyethyl guanosine
  modified_base 2: mod_base = OTHER; note = 2'-O-methoxyethyl 5-methylcytidine
  modified_base 3: mod_base = OTHER; note = 2'-O-methoxyethyl guanosine
  modified_base 4: mod_base = OTHER; note = 2'-O-methoxyethyl 5-methylcytidine
  modified_base 5: mod_base = OTHER; note = 2'-O-methoxyethyl 5-methylcytidine
  modified_base 8: mod_base = OTHER; note = 2'-deoxy 5-methylcytidine
  modified_base 13: mod_base = OTHER; note = 2'-deoxy 5-methylcytidine
  modified_base 16: mod_base = OTHER; note = 2'-O-methoxyethyl adenosine
  modified_base 17: mod_base = OTHER; note = 2'-O-methoxyethyl adenosine
  modified_base 18: mod_base = OTHER; note = 2'-O-methoxyethyl adenosine
  modified_base 19: mod_base = OTHER; note = 2'-O-methoxyethyl 5-methylcytidine
  modified_base 20: mod_base = OTHER; note = 2'-O-methoxyethyl adenosine
  misc_feature 1..5: note = RNA
  misc_feature 6..15: note = DNA
  misc_feature 16..20: note = RNA
gcgccgacgggacgtaaaca

SEQ ID NO: 610 - DNA, 20 bp, synthetic construct
  source 1..20: mol_type = other DNA
  modified_base 1: mod_base = OTHER; note = 2'-O-methoxyethyl 5-methylcytidine
  modified_base 2: mod_base = OTHER; note = 2'-O-methoxyethyl guanosine
  modified_base 3: mod_base = OTHER; note = 2'-O-methoxyethyl 5-methylcytidine
  modified_base 4: mod_base = OTHER; note = 2'-O-methoxyethyl 5-methylcytidine
  modified_base 5: mod_base = OTHER; note = 2'-O-methoxyethyl guanosine
  modified_base 7: mod_base = OTHER; note = 2'-deoxy 5-methylcytidine
  modified_base 12: mod_base = OTHER; note = 2'-deoxy 5-methylcytidine
  modified_base 16: mod_base = OTHER; note = 2'-O-methoxyethyl adenosine
  modified_base 17: mod_base = OTHER; note = 2'-O-methoxyethyl adenosine
  modified_base 18: mod_base = OTHER; note = 2'-O-methoxyethyl 5-methylcytidine
  modified_base 19: mod_base = OTHER; note = 2'-O-methoxyethyl adenosine
  modified_base 20: mod_base = OTHER; note = 2'-O-methoxyethyl adenosine
  misc_feature 1..5: note = RNA
  misc_feature 6..15: note = DNA
  misc_feature 16..20: note = RNA
cgccgacgggacgtaaacaa

SEQ ID NO: 611 - DNA, 20 bp, synthetic construct
  source 1..20: mol_type = other DNA
  modified_base 1: mod_base = OTHER; note = 2'-O-methoxyethyl guanosine
  modified_base 2: mod_base = OTHER; note = 2'-O-methoxyethyl 5-methylcytidine
  modified_base 3: mod_base = OTHER; note = 2'-O-methoxyethyl 5-methylcytidine
  modified_base 4: mod_base = OTHER; note = 2'-O-methoxyethyl guanosine
  modified_base 5: mod_base = OTHER; note = 2'-O-methoxyethyl adenosine
  modified_base 6: mod_base = OTHER; note = 2'-deoxy 5-methylcytidine
  modified_base 11: mod_base = OTHER; note = 2'-deoxy 5-methylcytidine
  modified_base 16: mod_base = OTHER; note = 2'-O-methoxyethyl adenosine
  modified_base 17: mod_base = OTHER; note = 2'-O-methoxyethyl 5-methylcytidine
  modified_base 18: mod_base = OTHER; note = 2'-O-methoxyethyl adenosine
  modified_base 19: mod_base = OTHER; note = 2'-O-methoxyethyl adenosine
  modified_base 20: mod_base = OTHER; note = 2'-O-methoxyethyl adenosine
  misc_feature 1..5: note = RNA
  misc_feature 6..15: note = DNA
  misc_feature 16..20: note = RNA
gccgacgggacgtaaacaaa

SEQ ID NO: 612 - DNA, 20 bp, synthetic construct
  source 1..20: mol_type = other DNA
  modified_base 1: mod_base = OTHER; note = 2'-O-methoxyethyl 5-methylcytidine
  modified_base 2: mod_base = OTHER; note = 2'-O-methoxyethyl 5-methylcytidine
  modified_base 3: mod_base = OTHER; note = 2'-O-methoxyethyl guanosine
  modified_base 4: mod_base = OTHER; note = 2'-O-methoxyethyl adenosine
  modified_base 5: mod_base = OTHER; note = 2'-O-methoxyethyl 5-methylcytidine
  modified_base 10: mod_base = OTHER; note = 2'-deoxy 5-methylcytidine
  modified_base 16: mod_base = OTHER; note = 2'-O-methoxyethyl 5-methylcytidine
  modified_base 17: mod_base = OTHER; note = 2'-O-methoxyethyl adenosine
  modified_base 18: mod_base = OTHER; note = 2'-O-methoxyethyl adenosine
  modified_base 19: mod_base = OTHER; note = 2'-O-methoxyethyl adenosine
  modified_base 20: mod_base = OTHER; note = 2'-O-methoxyethyl guanosine
  misc_feature 1..5: note = RNA
  misc_feature 6..15: note = DNA
  misc_feature 16..20: note = RNA
ccgacgggacgtaaacaaag

SEQ ID NO: 613 - DNA, 20 bp, synthetic construct
  source 1..20: mol_type = other DNA
  modified_base 1: mod_base = OTHER; note = 2'-O-methoxyethyl 5-methylcytidine
  modified_base 2: mod_base = OTHER; note = 2'-O-methoxyethyl guanosine
  modified_base 3: mod_base = OTHER; note = 2'-O-methoxyethyl adenosine
  modified_base 4: mod_base = OTHER; note = 2'-O-methoxyethyl 5-methylcytidine
  modified_base 5: mod_base = OTHER; note = 2'-O-methoxyethyl guanosine
  modified_base 9: mod_base = OTHER; note = 2'-deoxy 5-methylcytidine
  modified_base 15: mod_base = OTHER; note = 2'-deoxy 5-methylcytidine
  modified_base 16: mod_base = OTHER; note = 2'-O-methoxyethyl adenosine
  modified_base 17: mod_base = OTHER; note = 2'-O-methoxyethyl adenosine
  modified_base 18: mod_base = OTHER; note = 2'-O-methoxyethyl adenosine
  modified_base 19: mod_base = OTHER; note = 2'-O-methoxyethyl guanosine
  modified_base 20: mod_base = OTHER; note = 2'-O-methoxyethyl guanosine
  misc_feature 1..5: note = RNA
  misc_feature 6..15: note = DNA
  misc_feature 16..20: note = RNA
cgacgggacgtaaacaaagg

SEQ ID NO: 614 - DNA, 40 bp, synthetic construct
  source 1..40: mol_type = other DNA
  modified_base 1: mod_base = OTHER; note = 2'-O-methoxyethyl guanosine
  modified_base 2: mod_base = OTHER; note = 2'-O-methoxyethyl 5-methylcytidine
  modified_base 3: mod_base = OTHER; note = 2'-O-methoxyethyl guanosine
  modified_base 4: mod_base = OTHER; note = 2'-O-methoxyethyl adenosine
  modified_base 5: mod_base = OTHER; note = 2'-O-methoxyethyl adenosine
  modified_base 9: mod_base = OTHER; note = 2'-deoxy 5-methylcytidine
  modified_base 11: mod_base = OTHER; note = 2'-deoxy 5-methylcytidine
  modified_base 13: mod_base = OTHER; note = 2'-deoxy 5-methylcytidine
  modified_base 16: mod_base = OTHER; note = 2'-O-methoxyethyl thymidine
  modified_base 17: mod_base = OTHER; note = 2'-O-methoxyethyl 5-methylcytidine
  modified_base 18: mod_base = OTHER; note = 2'-O-methoxyethyl 5-methylcytidine
  modified_base 19: mod_base = OTHER; note = 2'-O-methoxyethyl guanosine
  modified_base 20: mod_base = OTHER; note = 2'-O-methoxyethyl guanosine
  modified_base 21: mod_base = OTHER; note = 2'-O-methoxyethyl adenosine
  modified_base 22: mod_base = OTHER; note = 2'-O-methoxyethyl adenosine
  modified_base 23: mod_base = OTHER; note = 2'-O-methoxyethyl 5-methylcytidine
  modified_base 24: mod_base = OTHER; note = 2'-O-methoxyethyl adenosine
  modified_base 25: mod_base = OTHER; note = 2'-O-methoxyethyl 5-methylcytidine
  modified_base 26: mod_base = OTHER; note = 2'-O-methoxyethyl adenosine
  modified_base 27: mod_base = OTHER; note = 2'-O-methoxyethyl adenosine
  modified_base 28: mod_base = OTHER; note = 2'-O-methoxyethyl 5-methylcytidine
  modified_base 29: mod_base = OTHER; note = 2'-O-methoxyethyl adenosine
  modified_base 30: mod_base = OTHER; note = 2'-O-methoxyethyl 5-methylcytidine
  modified_base 31: mod_base = OTHER; note = 2'-O-methoxyethyl adenosine
  modified_base 32: mod_base = OTHER; note = 2'-O-methoxyethyl adenosine
  modified_base 33: mod_base = OTHER; note = 2'-O-methoxyethyl 5-methylcytidine
  modified_base 34: mod_base = OTHER; note = 2'-O-methoxyethyl adenosine
  modified_base 35: mod_base = OTHER; note = 2'-O-methoxyethyl 5-methylcytidine
  modified_base 36: mod_base = OTHER; note = 2'-O-methoxyethyl adenosine
  modified_base 37: mod_base = OTHER; note = 2'-O-methoxyethyl adenosine
  modified_base 38: mod_base = OTHER; note = 2'-O-methoxyethyl 5-methylcytidine
  modified_base 39: mod_base = OTHER; note = 2'-O-methoxyethyl adenosine
  modified_base 40: mod_base = OTHER; note = 2'-O-methoxyethyl 5-methylcytidine
  misc_feature 1..5: note = RNA
  misc_feature 6..15: note = DNA
  misc_feature 16..40: note = RNA
gcgaagtgcacacggtccggaacacaacacaacacaacac

SEQ ID NO: 615 - DNA, 40 bp, synthetic construct
  source 1..40: mol_type = other DNA
  modified_base 1: mod_base = OTHER; note = 2'-O-methoxyethyl adenosine
  modified_base 2: mod_base = OTHER; note = 2'-O-methoxyethyl adenosine
  modified_base 3: mod_base = OTHER; note = 2'-O-methoxyethyl 5-methylcytidine
  modified_base 4: mod_base = OTHER; note = 2'-O-methoxyethyl adenosine
  modified_base 5: mod_base = OTHER; note = 2'-O-methoxyethyl 5-methylcytidine
  modified_base 6: mod_base = OTHER; note = 2'-O-methoxyethyl adenosine
  modified_base 7: mod_base = OTHER; note = 2'-O-methoxyethyl adenosine
  modified_base 8: mod_base = OTHER; note = 2'-O-methoxyethyl 5-methylcytidine
  modified_base 9: mod_base = OTHER; note = 2'-O-methoxyethyl adenosine
  modified_base 10: mod_base = OTHER; note = 2'-O-methoxyethyl 5-methylcytidine
  modified_base 11: mod_base = OTHER; note = 2'-O-methoxyethyl guanosine
  modified_base 12: mod_base = OTHER; note = 2'-O-methoxyethyl 5-methylcytidine
  modified_base 13: mod_base = OTHER; note = 2'-O-methoxyethyl guanosine
  modified_base 14: mod_base = OTHER; note = 2'-O-methoxyethyl adenosine
  modified_base 15: mod_base = OTHER; note = 2'-O-methoxyethyl adenosine
  modified_base 19: mod_base = OTHER; note = 2'-deoxy 5-methylcytidine
  modified_base 21: mod_base = OTHER; note = 2'-deoxy 5-methylcytidine
  modified_base 23: mod_base = OTHER; note = 2'-deoxy 5-methylcytidine
  modified_base 26: mod_base = OTHER; note = 2'-O-methoxyethyl thymidine
  modified_base 27: mod_base = OTHER; note = 2'-O-methoxyethyl 5-methylcytidine
  modified_base 28: mod_base = OTHER; note = 2'-O-methoxyethyl 5-methylcytidine
  modified_base 29: mod_base = OTHER; note = 2'-O-methoxyethyl guanosine
  modified_base 30: mod_base = OTHER; note = 2'-O-methoxyethyl guanosine
  modified_base 31: mod_base = OTHER; note = 2'-O-methoxyethyl adenosine
  modified_base 32: mod_base = OTHER; note = 2'-O-methoxyethyl adenosine
  modified_base 33: mod_base = OTHER; note = 2'-O-methoxyethyl 5-methylcytidine
  modified_base 34: mod_base = OTHER; note = 2'-O-methoxyethyl adenosine
  modified_base 35: mod_base = OTHER; note = 2'-O-methoxyethyl 5-methylcytidine
  modified_base 36: mod_base = OTHER; note = 2'-O-methoxyethyl adenosine
  modified_base 37: mod_base = OTHER; note = 2'-O-methoxyethyl adenosine
  modified_base 38: mod_base = OTHER; note = 2'-O-methoxyethyl 5-methylcytidine
  modified_base 39: mod_base = OTHER; note = 2'-O-methoxyethyl adenosine
  modified_base 40: mod_base = OTHER; note = 2'-O-methoxyethyl 5-methylcytidine
  misc_feature 1..15: note = RNA
  misc_feature 16..25: note = DNA
  misc_feature 26..40: note = RNA
aacacaacacgcgaagtgcacacggtccggaacacaacac

SEQ ID NO: 616 - DNA, 40 bp, synthetic construct
  source 1..40: mol_type = other DNA
  modified_base 1: mod_base = OTHER; note = 2'-O-methoxyethyl adenosine
  modified_base 2: mod_base = OTHER; note = 2'-O-methoxyethyl adenosine
  modified_base 3: mod_base = OTHER; note = 2'-O-methoxyethyl 5-methylcytidine
  modified_base 4: mod_base = OTHER; note = 2'-O-methoxyethyl adenosine
  modified_base 5: mod_base = OTHER; note = 2'-O-methoxyethyl 5-methylcytidine
  modified_base 6: mod_base = OTHER; note = 2'-O-methoxyethyl adenosine
  modified_base 7: mod_base = OTHER; note = 2'-O-methoxyethyl adenosine
  modified_base 8: mod_base = OTHER; note = 2'-O-methoxyethyl 5-methylcytidine
  modified_base 9: mod_base = OTHER; note = 2'-O-methoxyethyl adenosine
  modified_base 10: mod_base = OTHER; note = 2'-O-methoxyethyl 5-methylcytidine
  modified_base 11: mod_base = OTHER; note = 2'-O-methoxyethyl adenosine
  modified_base 12: mod_base = OTHER; note = 2'-O-methoxyethyl adenosine
  modified_base 13: mod_base = OTHER; note = 2'-O-methoxyethyl 5-methylcytidine
  modified_base 14: mod_base = OTHER; note = 2'-O-methoxyethyl adenosine
  modified_base 15: mod_base = OTHER; note = 2'-O-methoxyethyl 5-methylcytidine
  modified_base 16: mod_base = OTHER; note = 2'-O-methoxyethyl adenosine
  modified_base 17: mod_base = OTHER; note = 2'-O-methoxyethyl adenosine
  modified_base 18: mod_base = OTHER; note = 2'-O-methoxyethyl 5-methylcytidine
  modified_base 19: mod_base = OTHER; note = 2'-O-methoxyethyl adenosine
  modified_base 20: mod_base = OTHER; note = 2'-O-methoxyethyl 5-methylcytidine
  modified_base 21: mod_base = OTHER; note = 2'-O-methoxyethyl guanosine
  modified_base 22: mod_base = OTHER; note = 2'-O-methoxyethyl 5-methylcytidine
  modified_base 23: mod_base = OTHER; note = 2'-O-methoxyethyl guanosine
  modified_base 24: mod_base = OTHER; note = 2'-O-methoxyethyl adenosine
  modified_base 25: mod_base = OTHER; note = 2'-O-methoxyethyl adenosine
  modified_base 29: mod_base = OTHER; note = 2'-deoxy 5-methylcytidine
  modified_base 31: mod_base = OTHER; note = 2'-deoxy 5-methylcytidine
  modified_base 33: mod_base = OTHER; note = 2'-deoxy 5-methylcytidine
  modified_base 36: mod_base = OTHER; note = 2'-O-methoxyethyl thymidine
  modified_base 37: mod_base = OTHER; note = 2'-O-methoxyethyl 5-methylcytidine
  modified_base 38: mod_base = OTHER; note = 2'-O-methoxyethyl 5-methylcytidine
  modified_base 39: mod_base = OTHER; note = 2'-O-methoxyethyl guanosine
  modified_base 40: mod_base = OTHER; note = 2'-O-methoxyethyl guanosine
  misc_feature 1..25: note = RNA
  misc_feature 26..35: note = DNA
  misc_feature 36..40: note = RNA
aacacaacacaacacaacacgcgaagtgcacacggtccgg

SEQ ID NO: 617 - DNA, 40 bp, synthetic construct
  source 1..40: mol_type = other DNA
  modified_base 1: mod_base = OTHER; note = 2'-O-methoxyethyl 5-methylcytidine
  modified_base 2: mod_base = OTHER; note = 2'-O-methoxyethyl adenosine
  modified_base 3: mod_base = OTHER; note = 2'-O-methoxyethyl 5-methylcytidine
  modified_base 4: mod_base = OTHER; note = 2'-O-methoxyethyl thymidine
  modified_base 5: mod_base = OTHER; note = 2'-O-methoxyethyl adenosine
  modified_base 11: mod_base = OTHER; note = 2'-deoxy 5-methylcytidine
  modified_base 16: mod_base = OTHER; note = 2'-O-methoxyethyl 5-methylcytidine
  modified_base 17: mod_base = OTHER; note = 2'-O-methoxyethyl 5-methylcytidine
  modified_base 18: mod_base = OTHER; note = 2'-O-methoxyethyl adenosine
  modified_base 19: mod_base = OTHER; note = 2'-O-methoxyethyl guanosine
  modified_base 20: mod_base = OTHER; note = 2'-O-methoxyethyl guanosine
  modified_base 21: mod_base = OTHER; note = 2'-O-methoxyethyl adenosine
  modified_base 22: mod_base = OTHER; note = 2'-O-methoxyethyl adenosine
  modified_base 23: mod_base = OTHER; note = 2'-O-methoxyethyl 5-methylcytidine
  modified_base 24: mod_base = OTHER; note = 2'-O-methoxyethyl adenosine
  modified_base 25: mod_base = OTHER; note = 2'-O-methoxyethyl 5-methylcytidine
  modified_base 26: mod_base = OTHER; note = 2'-O-methoxyethyl adenosine
  modified_base 27: mod_base = OTHER; note = 2'-O-methoxyethyl adenosine
  modified_base 28: mod_base = OTHER; note = 2'-O-methoxyethyl 5-methylcytidine
  modified_base 29: mod_base = OTHER; note = 2'-O-methoxyethyl adenosine
  modified_base 30: mod_base = OTHER; note = 2'-O-methoxyethyl 5-methylcytidine
  modified_base 31: mod_base = OTHER; note = 2'-O-methoxyethyl adenosine
  modified_base 32: mod_base = OTHER; note = 2'-O-methoxyethyl adenosine
  modified_base 33: mod_base = OTHER; note = 2'-O-methoxyethyl 5-methylcytidine
  modified_base 34: mod_base = OTHER; note = 2'-O-methoxyethyl adenosine
  modified_base 35: mod_base = OTHER; note = 2'-O-methoxyethyl 5-methylcytidine
  modified_base 36: mod_base = OTHER; note = 2'-O-methoxyethyl adenosine
  modified_base 37: mod_base = OTHER; note = 2'-O-methoxyethyl adenosine
  modified_base 38: mod_base = OTHER; note = 2'-O-methoxyethyl 5-methylcytidine
  modified_base 39: mod_base = OTHER; note = 2'-O-methoxyethyl adenosine
  modified_base 40: mod_base = OTHER; note = 2'-O-methoxyethyl 5-methylcytidine
  misc_feature 1..5: note = RNA
  misc_feature 6..15: note = DNA
  misc_feature 16..40: note = RNA
cactagtaaactgagccaggaacacaacacaacacaacac

SEQ ID NO: 618 - DNA, 40 bp, synthetic construct
  source 1..40: mol_type = other DNA
  modified_base 1: mod_base = OTHER; note = 2'-O-methoxyethyl thymidine
  modified_base 2: mod_base = OTHER; note = 2'-O-methoxyethyl 5-methylcytidine
  modified_base 3: mod_base = OTHER; note = 2'-O-methoxyethyl 5-methylcytidine
  modified_base 4: mod_base = OTHER; note = 2'-O-methoxyethyl guanosine
  modified_base 5: mod_base = OTHER; note = 2'-O-methoxyethyl 5-methylcytidine
  modified_base 15: mod_base = OTHER; note = 2'-deoxy 5-methylcytidine
  modified_base 16: mod_base = OTHER; note = 2'-O-methoxyethyl guanosine
  modified_base 17: mod_base = OTHER; note = 2'-O-methoxyethyl guanosine
  modified_base 18: mod_base = OTHER; note = 2'-O-methoxyethyl 5-methylcytidine
  modified_base 19: mod_base = OTHER; note = 2'-O-methoxyethyl adenosine
  modified_base 20: mod_base = OTHER; note = 2'-O-methoxyethyl guanosine
  modified_base 21: mod_base = OTHER; note = 2'-O-methoxyethyl adenosine
  modified_base 22: mod_base = OTHER; note = 2'-O-methoxyethyl adenosine
  modified_base 23: mod_base = OTHER; note = 2'-O-methoxyethyl 5-methylcytidine
  modified_base 24: mod_base = OTHER; note = 2'-O-methoxyethyl adenosine
  modified_base 25: mod_base = OTHER; note = 2'-O-methoxyethyl 5-methylcytidine
  modified_base 26: mod_base = OTHER; note = 2'-O-methoxyethyl adenosine
  modified_base 27: mod_base = OTHER; note = 2'-O-methoxyethyl adenosine
  modified_base 28: mod_base = OTHER; note = 2'-O-methoxyethyl 5-methylcytidine
  modified_base 29: mod_base = OTHER; note = 2'-O-methoxyethyl adenosine
  modified_base 30: mod_base = OTHER; note = 2'-O-methoxyethyl 5-methylcytidine
  modified_base 31: mod_base = OTHER; note = 2'-O-methoxyethyl adenosine
  modified_base 32: mod_base = OTHER; note = 2'-O-methoxyethyl adenosine
  modified_base 33: mod_base = OTHER; note = 2'-O-methoxyethyl 5-methylcytidine
  modified_base 34: mod_base = OTHER; note = 2'-O-methoxyethyl adenosine
  modified_base 35: mod_base = OTHER; note = 2'-O-methoxyethyl 5-methylcytidine
  modified_base 36: mod_base = OTHER; note = 2'-O-methoxyethyl adenosine
  modified_base 37: mod_base = OTHER; note = 2'-O-methoxyethyl adenosine
  modified_base 38: mod_base = OTHER; note = 2'-O-methoxyethyl 5-methylcytidine
  modified_base 39: mod_base = OTHER; note = 2'-O-methoxyethyl adenosine
  modified_base 40: mod_base = OTHER; note = 2'-O-methoxyethyl 5-methylcytidine
  misc_feature 1..5: note = RNA
  misc_feature 6..15: note = DNA
  misc_feature 16..40: note = RNA
tccgcagtatggatcggcagaacacaacacaacacaacac

SEQ ID NO: 619 - DNA, 40 bp, synthetic construct
  source 1..40: mol_type = other DNA
  modified_base 1: mod_base = OTHER; note = 2'-O-methoxyethyl 5-methylcytidine
  modified_base 2: mod_base = OTHER; note = 2'-O-methoxyethyl thymidine
  modified_base 3: mod_base = OTHER; note = 2'-O-methoxyethyl guanosine
  modified_base 4: mod_base = OTHER; note = 2'-O-methoxyethyl 5-methylcytidine
  modified_base 5: mod_base = OTHER; note = 2'-O-methoxyethyl guanosine
  modified_base 16: mod_base = OTHER; note = 2'-O-methoxyethyl guanosine
  modified_base 17: mod_base = OTHER; note = 2'-O-methoxyethyl adenosine
  modified_base 18: mod_base = OTHER; note = 2'-O-methoxyethyl thymidine
  modified_base 19: mod_base = OTHER; note = 2'-O-methoxyethyl thymidine
  modified_base 20: mod_base = OTHER; note = 2'-O-methoxyethyl 5-methylcytidine
  modified_base 21: mod_base = OTHER; note = 2'-O-methoxyethyl adenosine
  modified_base 22: mod_base = OTHER; note = 2'-O-methoxyethyl adenosine
  modified_base 23: mod_base = OTHER; note = 2'-O-methoxyethyl 5-methylcytidine
  modified_base 24: mod_base = OTHER; note = 2'-O-methoxyethyl adenosine
  modified_base 25: mod_base = OTHER; note = 2'-O-methoxyethyl 5-methylcytidine
  modified_base 26: mod_base = OTHER; note = 2'-O-methoxyethyl adenosine
  modified_base 27: mod_base = OTHER; note = 2'-O-methoxyethyl adenosine
  modified_base 28: mod_base = OTHER; note = 2'-O-methoxyethyl 5-methylcytidine
  modified_base 29: mod_base = OTHER; note = 2'-O-methoxyethyl adenosine
  modified_base 30: mod_base = OTHER; note = 2'-O-methoxyethyl 5-methylcytidine
  modified_base 31: mod_base = OTHER; note = 2'-O-methoxyethyl adenosine
  modified_base 32: mod_base = OTHER; note = 2'-O-methoxyethyl adenosine
  modified_base 33: mod_base = OTHER; note = 2'-O-methoxyethyl 5-methylcytidine
  modified_base 34: mod_base = OTHER; note = 2'-O-methoxyethyl adenosine
  modified_base 35: mod_base = OTHER; note = 2'-O-methoxyethyl 5-methylcytidine
  modified_base 36: mod_base = OTHER; note = 2'-O-methoxyethyl adenosine
  modified_base 37: mod_base = OTHER; note = 2'-O-methoxyethyl adenosine
  modified_base 38: mod_base = OTHER; note = 2'-O-methoxyethyl 5-methylcytidine
  modified_base 39: mod_base = OTHER; note = 2'-O-methoxyethyl adenosine
  modified_base 40: mod_base = OTHER; note = 2'-O-methoxyethyl 5-methylcytidine
  misc_feature 1..5: note = RNA
  misc_feature 6..15: note = DNA
  misc_feature 16..40: note = RNA
ctgcggtattgtgaggattcaacacaacacaacacaacac

SEQ ID NO: 620 - DNA, 40 bp, synthetic construct
  source 1..40: mol_type = other DNA
  modified_base 1: mod_base = OTHER; note = 2'-O-methoxyethyl guanosine
  modified_base 2: mod_base = OTHER; note = 2'-O-methoxyethyl 5-methylcytidine
  modified_base 3: mod_base = OTHER; note = 2'-O-methoxyethyl adenosine
  modified_base 4: mod_base = OTHER; note = 2'-O-methoxyethyl guanosine
  modified_base 5: mod_base = OTHER; note = 2'-O-methoxyethyl adenosine
  modified_base 13: mod_base = OTHER; note = 2'-deoxy 5-methylcytidine
  modified_base 16: mod_base = OTHER; note = 2'-O-methoxyethyl adenosine
  modified_base 17: mod_base = OTHER; note = 2'-O-methoxyethyl guanosine
  modified_base 18: mod_base = OTHER; note = 2'-O-methoxyethyl thymidine
  modified_base 19: mod_base = OTHER; note = 2'-O-methoxyethyl guanosine
  modified_base 20: mod_base = OTHER; note = 2'-O-methoxyethyl 5-methylcytidine
  modified_base 21: mod_base = OTHER; note = 2'-O-methoxyethyl adenosine
  modified_base 22: mod_base = OTHER; note = 2'-O-methoxyethyl adenosine
  modified_base 23: mod_base = OTHER; note = 2'-O-methoxyethyl 5-methylcytidine
  modified_base 24: mod_base = OTHER; note = 2'-O-methoxyethyl adenosine
  modified_base 25: mod_base = OTHER; note = 2'-O-methoxyethyl adenosine
  modified_base 26: mod_base = OTHER; note = 2'-O-methoxyethyl 5-methylcytidine
  modified_base 27: mod_base = OTHER; note = 2'-O-methoxyethyl adenosine
  modified_base 28: mod_base = OTHER; note = 2'-O-methoxyethyl adenosine
  modified_base 29: mod_base = OTHER; note = 2'-O-methoxyethyl 5-methylcytidine
  modified_base 30: mod_base = OTHER; note = 2'-O-methoxyethyl adenosine
  modified_base 31: mod_base = OTHER; note = 2'-O-methoxyethyl adenosine
  modified_base 32: mod_base = OTHER; note = 2'-O-methoxyethyl 5-methylcytidine
  modified_base 33: mod_base = OTHER; note = 2'-O-methoxyethyl adenosine
  modified_base 34: mod_base = OTHER; note = 2'-O-methoxyethyl adenosine
  modified_base 35: mod_base = OTHER; note = 2'-O-methoxyethyl 5-methylcytidine
  modified_base 36: mod_base = OTHER; note = 2'-O-methoxyethyl adenosine
  modified_base 37: mod_base = OTHER; note = 2'-O-methoxyethyl adenosine
  modified_base 38: mod_base = OTHER; note = 2'-O-methoxyethyl 5-methylcytidine
  modified_base 39: mod_base = OTHER; note = 2'-O-methoxyethyl adenosine
  modified_base 40: mod_base = OTHER; note = 2'-O-methoxyethyl adenosine
  misc_feature 1..5: note = RNA
  misc_feature 6..15: note = DNA
  misc_feature 16..40: note = RNA
gcagaggtgaagcgaagtgcaacaacaacaacaacaacaa

SEQ ID NO: 621 - DNA, 20 bp, synthetic construct
  source 1..20: mol_type = other DNA
  modified_base 1: mod_base = OTHER; note = 2'-O-methoxyethyl guanosine
  modified_base 2: mod_base = OTHER; note = 2'-O-methoxyethyl 5-methylcytidine
  modified_base 3: mod_base = OTHER; note = 2'-O-methoxyethyl guanosine
  modified_base 4: mod_base = OTHER; note = 2'-O-methoxyethyl adenosine
  modified_base 5: mod_base = OTHER; note = 2'-O-methoxyethyl adenosine
  modified_base 9: mod_base = OTHER; note = 2'-deoxy 5-methylcytidine
  modified_base 11: mod_base = OTHER; note = 2'-deoxy 5-methylcytidine
  modified_base 13: mod_base = OTHER; note = 2'-deoxy 5-methylcytidine
  modified_base 16: mod_base = OTHER; note = 2'-O-methoxyethyl adenosine
  modified_base 17: mod_base = OTHER; note = 2'-O-methoxyethyl 5-methylcytidine
  modified_base 18: mod_base = OTHER; note = 2'-O-methoxyethyl 5-methylcytidine
  modified_base 19: mod_base = OTHER; note = 2'-O-methoxyethyl guanosine
  modified_base 20: mod_base = OTHER; note = 2'-O-methoxyethyl guanosine
  misc_feature 1..5: note = RNA
  misc_feature 6..15: note = DNA
  misc_feature 16..20: note = RNA
gcgaagtgcacacggaccgg

SEQ ID NO: 622 - DNA, 20 bp, synthetic construct
  source 1..20: mol_type = other DNA
  modified_base 1: mod_base = OTHER; note = 2'-O-methoxyethyl 5-methylcytidine
  modified_base 2: mod_base = OTHER; note = 2'-O-methoxyethyl guanosine
  modified_base 3: mod_base = OTHER; note = 2'-O-methoxyethyl guanosine
  modified_base 4: mod_base = OTHER; note = 2'-O-methoxyethyl thymidine
  modified_base 5: mod_base = OTHER; note = 2'-O-methoxyethyl 5-methylcytidine
  modified_base 6: mod_base = OTHER; note = 2'-deoxy 5-methylcytidine
  modified_base 9: mod_base = OTHER; note = 2'-deoxy 5-methylcytidine
  modified_base 16: mod_base = OTHER; note = 2'-O-methoxyethyl guanosine
  modified_base 17: mod_base = OTHER; note = 2'-O-methoxyethyl adenosine
  modified_base 18: mod_base = OTHER; note = 2'-O-methoxyethyl adenosine
  modified_base 19: mod_base = OTHER; note = 2'-O-methoxyethyl guanosine
  modified_base 20: mod_base = OTHER; note = 2'-O-methoxyethyl guanosine
  misc_feature 1..5: note = RNA
  misc_feature 6..15: note = DNA
  misc_feature 16..20: note = RNA
cggtccggcagatgagaagg

SEQ ID NO: 623 - DNA, 20 bp, synthetic construct
  source 1..20: mol_type = other DNA
  modified_base 1: mod_base = OTHER; note = 2'-O-methoxyethyl guanosine
  modified_base 2: mod_base = OTHER; note = 2'-O-methoxyethyl thymidine
  modified_base 3: mod_base = OTHER; note = 2'-O-methoxyethyl 5-methylcytidine
  modified_base 4: mod_base = OTHER; note = 2'-O-methoxyethyl 5-methylcytidine
  modified_base 5: mod_base = OTHER; note = 2'-O-methoxyethyl guanosine
  modified_base 7: mod_base = OTHER; note = 2'-deoxy 5-methylcytidine
  modified_base 16: mod_base = OTHER; note = 2'-O-methoxyethyl adenosine
  modified_base 17: mod_base = OTHER; note = 2'-O-methoxyethyl guanosine
  modified_base 18: mod_base = OTHER; note = 2'-O-methoxyethyl guanosine
  modified_base 19: mod_base = OTHER; note = 2'-O-methoxyethyl 5-methylcytidine
  modified_base 20: mod_base = OTHER; note = 2'-O-methoxyethyl adenosine
  misc_feature 1..5: note = RNA
  misc_feature 6..15: note = DNA
  misc_feature 16..20: note = RNA
gtccggcagatgagaaggca

SEQ ID NO: 624 - DNA, 20 bp, synthetic construct
  source 1..20: mol_type = other DNA
  modified_base 1: mod_base = OTHER; note = 2'-O-methoxyethyl 5-methylcytidine
  modified_base 2: mod_base = OTHER; note = 2'-O-methoxyethyl 5-methylcytidine
  modified_base 3: mod_base = OTHER; note = 2'-O-methoxyethyl guanosine
  modified_base 4: mod_base = OTHER; note = 2'-O-methoxyethyl guanosine
  modified_base 5: mod_base = OTHER; note = 2'-O-methoxyethyl 5-methylcytidine
  modified_base 16: mod_base = OTHER; note = 2'-O-methoxyethyl guanosine
  modified_base 17: mod_base = OTHER; note = 2'-O-methoxyethyl 5-methylcytidine
  modified_base 18: mod_base = OTHER; note = 2'-O-methoxyethyl adenosine
  modified_base 19: mod_base = OTHER; note = 2'-O-methoxyethyl 5-methylcytidine
  modified_base 20: mod_base = OTHER; note = 2'-O-methoxyethyl adenosine
  misc_feature 1..5: note = RNA
  misc_feature 6..15: note = DNA
  misc_feature 16..20: note = RNA
ccggcagatgagaaggcaca

SEQ ID NO: 625 - DNA, 20 bp, synthetic construct
  source 1..20: mol_type = other DNA
  modified_base 1: mod_base = OTHER; note = 2'-O-methoxyethyl guanosine
  modified_base 2: mod_base = OTHER; note = 2'-O-methoxyethyl guanosine
  modified_base 3: mod_base = OTHER; note = 2'-O-methoxyethyl 5-methylcytidine
  modified_base 4: mod_base = OTHER; note = 2'-O-methoxyethyl adenosine
  modified_base 5: mod_base = OTHER; note = 2'-O-methoxyethyl guanosine
  modified_base 15: mod_base = OTHER; note = 2'-deoxy 5-methylcytidine
  modified_base 16: mod_base = OTHER; note = 2'-O-methoxyethyl adenosine
  modified_base 17: mod_base = OTHER; note = 2'-O-methoxyethyl 5-methylcytidine
  modified_base 18: mod_base = OTHER; note = 2'-O-methoxyethyl adenosine
  modified_base 19: mod_base = OTHER; note = 2'-O-methoxyethyl guanosine
  modified_base 20: mod_base = OTHER; note = 2'-O-methoxyethyl adenosine
  misc_feature 1..5: note = RNA
  misc_feature 6..15: note = DNA
  misc_feature 16..20: note = RNA
ggcagatgagaaggcacaga

SEQ ID NO: 626 - DNA, 20 bp, synthetic construct
  source 1..20: mol_type = other DNA
  modified_base 1: mod_base = OTHER; note = 2'-O-methoxyethyl adenosine
  modified_base 2: mod_base = OTHER; note = 2'-O-methoxyethyl adenosine
  modified_base 3: mod_base = OTHER; note = 2'-O-methoxyethyl guanosine
  modified_base 4: mod_base = OTHER; note = 2'-O-methoxyethyl guanosine
  modified_base 5: mod_base = OTHER; note = 2'-O-methoxyethyl 5-methylcytidine
  modified_base 7: mod_base = OTHER; note = 2'-deoxy 5-methylcytidine
  modified_base 11: mod_base = OTHER; note = 2'-deoxy 5-methylcytidine
  modified_base 16: mod_base = OTHER; note = 2'-O-methoxyethyl adenosine
  modified_base 17: mod_base = OTHER; note = 2'-O-methoxyethyl guanosine
  modified_base 18: mod_base = OTHER; note = 2'-O-methoxyethyl thymidine
  modified_base 19: mod_base = OTHER; note = 2'-O-methoxyethyl 5-methylcytidine
  modified_base 20: mod_base = OTHER; note = 2'-O-methoxyethyl 5-methylcytidine
  misc_feature 1..5: note = RNA
  misc_feature 6..15: note = DNA
  misc_feature 16..20: note = RNA
aaggcacagacggggagtcc

SEQ ID NO: 627 - DNA, 20 bp, synthetic construct
  source 1..20: mol_type = other DNA
  modified_base 1: mod_base = OTHER; note = 2'-O-methoxyethyl guanosine
  modified_base 2: mod_base = OTHER; note = 2'-O-methoxyethyl guanosine
  modified_base 3: mod_base = OTHER; note = 2'-O-methoxyethyl 5-methylcytidine
  modified_base 4: mod_base = OTHER; note = 2'-O-methoxyethyl adenosine
  modified_base 5: mod_base = OTHER; note = 2'-O-methoxyethyl 5-methylcytidine
  modified_base 9: mod_base = OTHER; note = 2'-deoxy 5-methylcytidine
  modified_base 16: mod_base = OTHER; note = 2'-O-methoxyethyl thymidine
  modified_base 17: mod_base = OTHER; note = 2'-O-methoxyethyl 5-methylcytidine
  modified_base 18: mod_base = OTHER; note = 2'-O-methoxyethyl 5-methylcytidine
  modified_base 19: mod_base = OTHER; note = 2'-O-methoxyethyl guanosine
  modified_base 20: mod_base = OTHER; note = 2'-O-methoxyethyl 5-methylcytidine
  misc_feature 1..5: note = RNA
  misc_feature 6..15: note = DNA
  misc_feature 16..20: note = RNA
ggcacagacggggagtccgc

SEQ ID NO: 628 - DNA, 20 bp, synthetic construct
  source 1..20: mol_type = other DNA
  modified_base 1: mod_base = OTHER; note = 2'-O-methoxyethyl 5-methylcytidine
  modified_base 2: mod_base = OTHER; note = 2'-O-methoxyethyl adenosine
  modified_base 3: mod_base = OTHER; note = 2'-O-methoxyethyl 5-methylcytidine
  modified_base 4: mod_base = OTHER; note = 2'-O-methoxyethyl adenosine
  modified_base 5: mod_base = OTHER; note = 2'-O-methoxyethyl guanosine
  modified_base 7: mod_base = OTHER; note = 2'-deoxy 5-methylcytidine
  modified_base 15: mod_base = OTHER; note = 2'-deoxy 5-methylcytidine
  modified_base 16: mod_base = OTHER; note = 2'-O-methoxyethyl 5-methylcytidine
  modified_base 17: mod_base = OTHER; note = 2'-O-methoxyethyl guanosine
  modified_base 18: mod_base = OTHER; note = 2'-O-methoxyethyl 5-methylcytidine
  modified_base 19: mod_base = OTHER; note = 2'-O-methoxyethyl guanosine
  modified_base 20: mod_base = OTHER; note = 2'-O-methoxyethyl thymidine
  misc_feature 1..5: note = RNA
  misc_feature 6..15: note = DNA
  misc_feature 16..20: note = RNA
cacagacggggagtccgcgt

SEQ ID NO: 629 - DNA, 20 bp, synthetic construct
  source 1..20: mol_type = other DNA
  modified_base 1: mod_base = OTHER; note = 2'-O-methoxyethyl guanosine
  modified_base 2: mod_base = OTHER; note = 2'-O-methoxyethyl adenosine
  modified_base 3: mod_base = OTHER; note = 2'-O-methoxyethyl guanosine
  modified_base 4: mod_base = OTHER; note = 2'-O-methoxyethyl thymidine
  modified_base 5: mod_base = OTHER; note = 2'-O-methoxyethyl 5-methylcytidine
  modified_base 6: mod_base = OTHER; note = 2'-deoxy 5-methylcytidine
  modified_base 8: mod_base = OTHER; note = 2'-deoxy 5-methylcytidine
  modified_base 16: mod_base = OTHER; note = 2'-O-methoxyethyl guanosine
  modified_base 17: mod_base = OTHER; note = 2'-O-methoxyethyl adenosine
  modified_base 18: mod_base = OTHER; note = 2'-O-methoxyethyl guanosine
  modified_base 19: mod_base = OTHER; note = 2'-O-methoxyethyl guanosine
  modified_base 20: mod_base = OTHER; note = 2'-O-methoxyethyl thymidine
  misc_feature 1..5: note = RNA
  misc_feature 6..15: note = DNA
  misc_feature 16..20: note = RNA
gagtccgcgtaaagagaggt

SEQ ID NO: 630 - DNA, 20 bp, synthetic construct
  source 1..20: mol_type = other DNA
  modified_base 1: mod_base = OTHER; note = 2'-O-methoxyethyl adenosine
  modified_base 2: mod_base = OTHER; note = 2'-O-methoxyethyl guanosine
  modified_base 3: mod_base = OTHER; note = 2'-O-methoxyethyl thymidine
  modified_base 4: mod_base = OTHER; note = 2'-O-methoxyethyl 5-methylcytidine
  modified_base 5: mod_base = OTHER; note = 2'-O-methoxyethyl 5-methylcytidine
  modified_base 7: mod_base = OTHER; note = 2'-deoxy 5-methylcytidine
  modified_base 16: mod_base = OTHER; note = 2'-O-methoxyethyl adenosine
  modified_base 17: mod_base = OTHER; note = 2'-O-methoxyethyl guanosine
  modified_base 18: mod_base = OTHER; note = 2'-O-methoxyethyl guanosine
  modified_base 19: mod_base = OTHER; note = 2'-O-methoxyethyl thymidine
  modified_base 20: mod_base = OTHER; note = 2'-O-methoxyethyl guanosine
  misc_feature 1..5: note = RNA
  misc_feature 6..15: note = DNA
  misc_feature 16..20: note = RNA
agtccgcgtaaagagaggtg

SEQ ID NO: 631 - DNA, 20 bp, synthetic construct
  source 1..20: mol_type = other DNA
  modified_base 1: mod_base = OTHER; note = 2'-O-methoxyethyl guanosine
  modified_base 2: mod_base = OTHER; note = 2'-O-methoxyethyl thymidine
  modified_base 3: mod_base = OTHER; note = 2'-O-methoxyethyl 5-methylcytidine
  modified_base 4: mod_base = OTHER; note = 2'-O-methoxyethyl 5-methylcytidine
  modified_base 5: mod_base = OTHER; note = 2'-O-methoxyethyl guanosine
  modified_base 6: mod_base = OTHER; note = 2'-deoxy 5-methylcytidine
  modified_base 16: mod_base = OTHER; note = 2'-O-methoxyethyl guanosine
  modified_base 17: mod_base = OTHER; note = 2'-O-methoxyethyl guanosine
  modified_base 18: mod_base = OTHER; note = 2'-O-methoxyethyl thymidine
  modified_base 19: mod_base = OTHER; note = 2'-O-methoxyethyl guanosine
  modified_base 20: mod_base = OTHER; note = 2'-O-methoxyethyl 5-methylcytidine
  misc_feature 1..5: note = RNA
  misc_feature 6..15: note = DNA
  misc_feature 16..20: note = RNA
gtccgcgtaaagagaggtgc

SEQ ID NO: 632 - DNA, 20 bp, synthetic construct
  source 1..20: mol_type = other DNA
  modified_base 1: mod_base = OTHER; note = 2'-O-methoxyethyl thymidine
  modified_base 2: mod_base = OTHER; note = 2'-O-methoxyethyl 5-methylcytidine
  modified_base 3: mod_base = OTHER; note = 2'-O-methoxyethyl 5-methylcytidine
  modified_base 4: mod_base = OTHER; note = 2'-O-methoxyethyl guanosine
  modified_base 5: mod_base = OTHER; note = 2'-O-methoxyethyl 5-methylcytidine
  modified_base 16: mod_base = OTHER; note = 2'-O-methoxyethyl guanosine
  modified_base 17: mod_base = OTHER; note = 2'-O-methoxyethyl thymidine
  modified_base 18: mod_base = OTHER; note = 2'-O-methoxyethyl guanosine
  modified_base 19: mod_base = OTHER; note = 2'-O-methoxyethyl 5-methylcytidine
  modified_base 20: mod_base = OTHER; note = 2'-O-methoxyethyl guanosine
  misc_feature 1..5: note = RNA
  misc_feature 6..15: note = DNA
  misc_feature 16..20: note = RNA
tccgcgtaaagagaggtgcg

SEQ ID NO: 633 - DNA, 20 bp, synthetic construct
  source 1..20: mol_type = other DNA
  modified_base 1: mod_base = OTHER; note = 2'-O-methoxyethyl 5-methylcytidine
  modified_base 2: mod_base = OTHER; note = 2'-O-methoxyethyl 5-methylcytidine
  modified_base 3: mod_base = OTHER; note = 2'-O-methoxyethyl guanosine
  modified_base 4: mod_base = OTHER; note = 2'-O-methoxyethyl 5-methylcytidine
  modified_base 5: mod_base = OTHER; note = 2'-O-methoxyethyl guanosine
  modified_base 16: mod_base = OTHER; note = 2'-O-methoxyethyl thymidine
  modified_base 17: mod_base = OTHER; note = 2'-O-methoxyethyl guanosine
  modified_base 18: mod_base = OTHER; note = 2'-O-methoxyethyl 5-methylcytidine
  modified_base 19: mod_base = OTHER; note = 2'-O-methoxyethyl guanosine
  modified_base 20: mod_base = OTHER; note = 2'-O-methoxyethyl 5-methylcytidine
  misc_feature 1..5: note = RNA
  misc_feature 6..15: note = DNA
  misc_feature 16..20: note = RNA
ccgcgtaaagagaggtgcgc

SEQ ID NO: 634 - DNA, 20 bp, synthetic construct
  source 1..20: mol_type = other DNA
  modified_base 1: mod_base = OTHER; note = 2'-O-methoxyethyl guanosine
  modified_base 2: mod_base = OTHER; note = 2'-O-methoxyethyl 5-methylcytidine
  modified_base 3: mod_base = OTHER; note = 2'-O-methoxyethyl guanosine
  modified_base 4: mod_base = OTHER; note = 2'-O-methoxyethyl thymidine
  modified_base 5: mod_base = OTHER; note = 2'-O-methoxyethyl adenosine
  modified_base 16: mod_base = OTHER; note = 2'-O-methoxyethyl 5-methylcytidine
  modified_base 17: mod_base = OTHER; note = 2'-O-methoxyethyl guanosine
  modified_base 18: mod_base = OTHER; note = 2'-O-methoxyethyl 5-methylcytidine
  modified_base 19: mod_base = OTHER; note = 2'-O-methoxyethyl 5-methylcytidine
  modified_base 20: mod_base = OTHER; note = 2'-O-methoxyethyl 5-methylcytidine
  misc_feature 1..5: note = RNA
  misc_feature 6..15: note = DNA
  misc_feature 16..20: note = RNA
gcgtaaagagaggtgcgccc

SEQ ID NO: 635 - DNA, 20 bp, synthetic construct
  source 1..20: mol_type = other DNA
  modified_base 1: mod_base = OTHER; note = 2'-O-methoxyethyl guanosine
  modified_base 2: mod_base = OTHER; note = 2'-O-methoxyethyl thymidine
  modified_base 3: mod_base = OTHER; note = 2'-O-methoxyethyl adenosine
  modified_base 4: mod_base = OTHER; note = 2'-O-methoxyethyl adenosine
  modified_base 5: mod_base = OTHER; note = 2'-O-methoxyethyl adenosine
  modified_base 14: mod_base = OTHER; note = 2'-deoxy 5-methylcytidine
  modified_base 16: mod_base = OTHER; note = 2'-O-methoxyethyl 5-methylcytidine
  modified_base 17: mod_base = OTHER; note = 2'-O-methoxyethyl 5-methylcytidine
  modified_base 18: mod_base = OTHER; note = 2'-O-methoxyethyl 5-methylcytidine
  modified_base 19: mod_base = OTHER; note = 2'-O-methoxyethyl 5-methylcytidine
  modified_base 20: mod_base = OTHER; note = 2'-O-methoxyethyl guanosine
  misc_feature 1..5: note = RNA
  misc_feature 6..15: note = DNA
  misc_feature 16..20: note = RNA
gtaaagagaggtgcgccccg

SEQ ID NO: 636 - DNA, 20 bp, synthetic construct
  source 1..20: mol_type = other DNA
  modified_base 1: mod_base = OTHER; note = 2'-O-methoxyethyl adenosine
  modified_base 2: mod_base = OTHER; note = 2'-O-methoxyethyl adenosine
  modified_base 3: mod_base = OTHER; note = 2'-O-methoxyethyl adenosine
  modified_base 4: mod_base = OTHER; note = 2'-O-methoxyethyl guanosine
  modified_base 5: mod_base = OTHER; note = 2'-O-methoxyethyl adenosine
  modified_base 12: mod_base = OTHER; note = 2'-deoxy 5-methylcytidine
  modified_base 14: mod_base = OTHER; note = 2'-deoxy 5-methylcytidine
  modified_base 15: mod_base = OTHER; note = 2'-deoxy 5-methylcytidine
  modified_base 16: mod_base = OTHER; note = 2'-O-methoxyethyl 5-methylcytidine
  modified_base 17: mod_base = OTHER; note = 2'-O-methoxyethyl 5-methylcytidine
  modified_base 18: mod_base = OTHER; note = 2'-O-methoxyethyl guanosine
  modified_base 19: mod_base = OTHER; note = 2'-O-methoxyethyl thymidine
  modified_base 20: mod_base = OTHER; note = 2'-O-methoxyethyl guanosine
  misc_feature 1..5: note = RNA
  misc_feature 6..15: note = DNA
  misc_feature 16..20: note = RNA
aaagagaggtgcgccccgtg

SEQ ID NO: 637 - DNA, 20 bp, synthetic construct
  source 1..20: mol_type = other DNA
  modified_base 1: mod_base = OTHER; note = 2'-O-methoxyethyl guanosine
  modified_base 2: mod_base = OTHER; note = 2'-O-methoxyethyl 5-methylcytidine
  modified_base 3: mod_base = OTHER; note = 2'-O-methoxyethyl guanosine
  modified_base 4: mod_base = OTHER; note = 2'-O-methoxyethyl adenosine
  modified_base 5: mod_base = OTHER; note = 2'-O-methoxyethyl adenosine
  modified_base 9: mod_base = OTHER; note = 2'-deoxy 5-methylcytidine
  modified_base 11: mod_base = OTHER; note = 2'-deoxy 5-methylcytidine
  modified_base 13: mod_base = OTHER; note = 2'-deoxy 5-methylcytidine
  modified_base 16: mod_base = OTHER; note = 2'-O-methoxyethyl thymidine
  modified_base 17: mod_base = OTHER; note = 2'-O-methoxyethyl 5-methylcytidine
  modified_base 18: mod_base = OTHER; note = 2'-O-methoxyethyl 5-methylcytidine
  modified_base 19: mod_base = OTHER; note = 2'-O-methoxyethyl guanosine
  modified_base 20: mod_base = OTHER; note = 2'-O-methoxyethyl guanosine
  misc_feature 1..5: note = RNA
  misc_feature 6..15: note = DNA
  misc_feature 16..20: note = RNA
gcgaagtgcacacggtccgg

SEQ ID NO: 638 - DNA, 20 bp, synthetic construct
  source 1..20: mol_type = other DNA
  modified_base 1: mod_base = OTHER; note = 2'-O-methoxyethyl guanosine
  modified_base 2: mod_base = OTHER; note = 2'-O-methoxyethyl thymidine
  modified_base 3: mod_base = OTHER; note = 2'-O-methoxyethyl 5-methylcytidine
  modified_base 4: mod_base = OTHER; note = 2'-O-methoxyethyl 5-methylcytidine
  modified_base 5: mod_base = OTHER; note = 2'-O-methoxyethyl guanosine
  modified_base 6: mod_base = OTHER; note = 2'-deoxy 5-methylcytidine
  modified_base 16: mod_base = OTHER; note = 2'-O-methoxyethyl guanosine
  modified_base 17: mod_base = OTHER; note = 2'-O-methoxyethyl guanosine
  modified_base 18: mod_base = OTHER; note = 2'-O-methoxyethyl thymidine
  modified_base 19: mod_base = OTHER; note = 2'-O-methoxyethyl guanosine
  modified_base 20: mod_base = OTHER; note = 2'-O-methoxyethyl 5-methylcytidine
  misc_feature 1..5: note = RNA
  misc_feature 6..15: note = DNA
  misc_feature 16..20: note = RNA
gtccgcgtaaagagaggtgc

SEQ ID NO: 639 - DNA, 20 bp, synthetic construct
  source 1..20: mol_type = other DNA
  modified_base 1: mod_base = OTHER; note = 2'-O-methoxyethyl guanosine
  modified_base 2: mod_base = OTHER; note = 2'-O-methoxyethyl thymidine
  modified_base 3: mod_base = OTHER; note = 2'-O-methoxyethyl guanosine
  modified_base 4: mod_base = OTHER; note = 2'-O-methoxyethyl adenosine
  modified_base 5: mod_base = OTHER; note = 2'-O-methoxyethyl adenosine
  modified_base 7: mod_base = OTHER; note = 2'-deoxy 5-methylcytidine
  modified_base 14: mod_base = OTHER; note = 2'-deoxy 5-methylcytidine
  modified_base 16: mod_base = OTHER; note = 2'-O-methoxyethyl 5-methylcytidine
  modified_base 17: mod_base = OTHER; note = 2'-O-methoxyethyl adenosine
  modified_base 18: mod_base = OTHER; note = 2'-O-methoxyethyl 5-methylcytidine
  modified_base 19: mod_base = OTHER; note = 2'-O-methoxyethyl guanosine
  modified_base 20: mod_base = OTHER; note = 2'-O-methoxyethyl guanosine
  misc_feature 1..5: note = RNA
  misc_feature 6..15: note = DNA
  misc_feature 16..20: note = RNA
gtgaagcgaagtgcacacgg

SEQ ID NO: 640 - DNA, 20 bp, synthetic construct
  source 1..20: mol_type = other DNA
  modified_base 1: mod_base = OTHER; note = 2'-O-methoxyethyl 5-methylcytidine
  modified_base 2: mod_base = OTHER; note = 2'-O-methoxyethyl 5-methylcytidine
  modified_base 3: mod_base = OTHER; note = 2'-O-methoxyethyl thymidine
  modified_base 4: mod_base = OTHER; note = 2'-O-methoxyethyl thymidine
  modified_base 5: mod_base = OTHER; note = 2'-O-methoxyethyl 5-methylcytidine
  modified_base 6: mod_base = OTHER; note = 2'-deoxy 5-methylcytidine
  modified_base 7: mod_base = OTHER; note = 2'-deoxy 5-methylcytidine
  modified_base 16: mod_base = OTHER; note = 2'-O-methoxyethyl 5-methylcytidine
  modified_base 17: mod_base = OTHER; note = 2'-O-methoxyethyl 5-methylcytidine
  modified_base 18: mod_base = OTHER; note = 2'-O-methoxyethyl thymidine
  modified_base 19: mod_base = OTHER; note = 2'-O-methoxyethyl 5-methylcytidine
  modified_base 20: mod_base = OTHER; note = 2'-O-methoxyethyl 5-methylcytidine
  misc_feature 1..5: note = RNA
  misc_feature 6..15: note = DNA
  misc_feature 16..20: note = RNA
ccttccctgaaggttcctcc

SEQ ID NO: 641 - DNA, 20 bp, synthetic construct
  source 1..20: mol_type = other DNA
  modified_base 1: mod_base = OTHER; note = 2'-O-methoxyethyl guanosine
  modified_base 2: mod_base = OTHER; note = 2'-O-methoxyethyl guanosine
  modified_base 3: mod_base = OTHER; note = 2'-O-methoxyethyl thymidine
  modified_base 4: mod_base = OTHER; note = 2'-O-methoxyethyl 5-methylcytidine
  modified_base 5: mod_base = OTHER; note = 2'-O-methoxyethyl 5-methylcytidine
  modified_base 8: mod_base = OTHER; note = 2'-deoxy 5-methylcytidine
  modified_base 16: mod_base = OTHER; note = 2'-O-methoxyethyl adenosine
  modified_base 17: mod_base = OTHER; note = 2'-O-methoxyethyl adenosine
  modified_base 18: mod_base = OTHER; note = 2'-O-methoxyethyl guanosine
  modified_base 19: mod_base = OTHER; note = 2'-O-methoxyethyl guanosine
  modified_base 20: mod_base = OTHER; note = 2'-O-methoxyethyl 5-methylcytidine
  misc_feature 1..5: note = RNA
  misc_feature 6..15: note = DNA
  misc_feature 16..20: note = RNA
ggtccggcagatgagaaggc

SEQ ID NO: 642 - DNA, 20 bp, synthetic construct
  source 1..20: mol_type = other DNA
  modified_base 1: mod_base = OTHER; note = 2'-O-methoxyethyl guanosine
  modified_base 2: mod_base = OTHER; note = 2'-O-methoxyethyl thymidine
  modified_base 3: mod_base = OTHER; note = 2'-O-methoxyethyl 5-methylcytidine
  modified_base 4: mod_base = OTHER; note = 2'-O-methoxyethyl 5-methylcytidine
  modified_base 5: mod_base = OTHER; note = 2'-O-methoxyethyl guanosine
  modified_base 6: mod_base = OTHER; note = 2'-deoxy 5-methylcytidine
  modified_base 16: mod_base = OTHER; note = 2'-O-methoxyethyl guanosine
  modified_base 17: mod_base = OTHER; note = 2'-O-methoxyethyl guanosine
  modified_base 18: mod_base = OTHER; note = 2'-O-methoxyethyl thymidine
  modified_base 19: mod_base = OTHER; note = 2'-O-methoxyethyl guanosine
  modified_base 20: mod_base = OTHER; note = 2'-O-methoxyethyl 5-methylcytidine
  misc_feature 1..5: note = RNA
  misc_feature 6..15: note = DNA
  misc_feature 16..20: note = RNA
gtccgcgtaaagagaggtgc

SEQ ID NO: 643 - DNA, 20 bp, synthetic construct
  source 1..20: mol_type = other DNA
  modified_base 1: mod_base = OTHER; note = 2'-O-methoxyethyl guanosine
  modified_base 2: mod_base = OTHER; note = 2'-O-methoxyethyl thymidine
  modified_base 3: mod_base = OTHER; note = 2'-O-methoxyethyl guanosine
  modified_base 4: mod_base = OTHER; note = 2'-O-methoxyethyl adenosine
  modified_base 5: mod_base = OTHER; note = 2'-O-methoxyethyl adenosine
  modified_base 7: mod_base = OTHER; note = 2'-deoxy 5-methylcytidine
  modified_base 14: mod_base = OTHER; note = 2'-deoxy 5-methylcytidine
  modified_base 16: mod_base = OTHER; note = 2'-O-methoxyethyl 5-methylcytidine
  modified_base 17: mod_base = OTHER; note = 2'-O-methoxyethyl adenosine
  modified_base 18: mod_base = OTHER; note = 2'-O-methoxyethyl 5-methylcytidine
  modified_base 19: mod_base = OTHER; note = 2'-O-methoxyethyl guanosine
  modified_base 20: mod_base = OTHER; note = 2'-O-methoxyethyl guanosine
  misc_feature 1..5: note = RNA
  misc_feature 6..15: note = DNA
  misc_feature 16..20: note = RNA
gtgaagcgaagtgcacacgg

SEQ ID NO: 644 - DNA, 22 bp, synthetic construct
  source 1..22: mol_type = other DNA
  modified_base 1: mod_base = OTHER; note = 2'-O-methoxyethyl uridine
  modified_base 2: mod_base = OTHER; note = 2'-O-methoxyethyl guanosine
  modified_base 3: mod_base = OTHER; note = 2'-O-methoxyethyl adenosine
  modified_base 4: mod_base = OTHER; note = 2'-O-methoxyethyl 5-methylcytidine
  modified_base 5: mod_base = OTHER; note = 2'-O-methoxyethyl uridine
  modified_base 11: mod_base = OTHER; note = 2'-deoxy 5-methylcytidine
  modified_base 15: mod_base = OTHER; note = 2'-deoxy 5-methylcytidine
  modified_base 18: mod_base = OTHER; note = 2'-O-methoxyethyl guanosine
  modified_base 19: mod_base = OTHER; note = 2'-O-methoxyethyl adenosine
  modified_base 20: mod_base = OTHER; note = 2'-O-methoxyethyl uridine
  modified_base 21: mod_base = OTHER; note = 2'-O-methoxyethyl guanosine
  modified_base 22: mod_base = OTHER; note = 2'-O-methoxyethyl adenosine
  misc_feature 1..5: note = RNA
  misc_feature 6..17: note = DNA
  misc_feature 18..22: note = RNA
tgactgtgaacgttcgagatga

SEQ ID NO: 645 - DNA, 22 bp, synthetic construct
  source 1..22: mol_type = other DNA
  modified_base 1: mod_base = OTHER; note = 2'-O-methoxyethyl uridine
  modified_base 2: mod_base = OTHER; note = 2'-O-methoxyethyl guanosine
  modified_base 3: mod_base = OTHER; note = 2'-O-methoxyethyl adenosine
  modified_base 4: mod_base = OTHER; note = 2'-O-methoxyethyl cytidine
  modified_base 5: mod_base = OTHER; note = 2'-O-methoxyethyl uridine
  modified_base 11: mod_base = OTHER; note = 2'-deoxy 5-methylcytidine
  modified_base 15: mod_base = OTHER; note = 2'-deoxy 5-methylcytidine
  modified_base 18: mod_base = OTHER; note = 2'-O-methoxyethyl guanosine
  modified_base 19: mod_base = OTHER; note = 2'-O-methoxyethyl adenosine
  modified_base 20: mod_base = OTHER; note = 2'-O-methoxyethyl uridine
  modified_base 21: mod_base = OTHER; note = 2'-O-methoxyethyl guanosine
  modified_base 22: mod_base = OTHER; note = 2'-O-methoxyethyl adenosine
  misc_feature 1..5: note = RNA
  misc_feature 6..17: note = DNA
  misc_feature 18..22: note = RNA
tgactgtgaacgttcgagatga

SEQ ID NO: 646 - DNA, 22 bp, synthetic construct
  source 1..22: mol_type = other DNA
  modified_base 1: mod_base = OTHER; note = 2'-O-methyl uridine
  modified_base 2: mod_base = OTHER; note = 2'-O-methyl guanosine
  modified_base 3: mod_base = OTHER; note = 2'-O-methyl adenosine
  modified_base 4: mod_base = OTHER; note = 2'-O-methoxyethyl cytidine
  modified_base 5: mod_base = OTHER; note = 2'-O-methyl uridine
  modified_base 11: mod_base = OTHER; note = 2'-deoxy 5-methylcytidine
  modified_base 15: mod_base = OTHER; note = 2'-deoxy 5-methylcytidine
  modified_base 18: mod_base = OTHER; note = 2'-O-methyl guanosine
  modified_base 19: mod_base = OTHER; note = 2'-O-methyl adenosine
  modified_base 20: mod_base = OTHER; note = 2'-O-methyl uridine
  modified_base 21: mod_base = OTHER; note = 2'-O-methyl guanosine
  modified_base 22: mod_base = OTHER; note = 2'-O-methyl adenosine
  misc_feature 1..5: note = RNA
  misc_feature 6..17: note = DNA
  misc_feature 18..22: note = RNA
tgactgtgaacgttcgagatga

SEQ ID NO: 647 - DNA, 22 bp, synthetic construct
  source 1..22: mol_type = other DNA
  modified_base 1: mod_base = OTHER; note = 2'-O-methoxyethyl uridine
  modified_base 2: mod_base = OTHER; note = 2'-O-methoxyethyl guanosine
  modified_base 3: mod_base = OTHER; note = 2'-O-methoxyethyl adenosine
  modified_base 4: mod_base = OTHER; note = 2'-O-methoxyethyl cytidine
  modified_base 5: mod_base = OTHER; note = 2'-O-methoxyethyl uridine
  modified_base 11: mod_base = OTHER; note = 2'-deoxy 5-methylcytidine
  modified_base 15: mod_base = OTHER; note = 2'-deoxy 5-methylcytidine
  modified_base 18: mod_base = OTHER; note = Locked nucleic acid with guanine base
  modified_base 19: mod_base = OTHER; note = Locked nucleic acid with adenine base
  modified_base 20: mod_base = OTHER; note = Locked nucleic acid with thymine base
  modified_base 21: mod_base = OTHER; note = Locked nucleic acid with guanine base
  modified_base 22: mod_base = OTHER; note = Locked nucleic acid with adenine base
  misc_feature 1..5: note = RNA
  misc_feature 6..17: note = DNA
  misc_feature 18..22: note = RNA
tgactgtgaacgttcgagatga

SEQ ID NO: 648 - DNA, 22 bp, synthetic construct
  source 1..22: mol_type = other DNA
  modified_base 1: mod_base = OTHER; note = Locked nucleic acid with thymine base
  modified_base 2: mod_base = OTHER; note = Locked nucleic acid with guanine base
  modified_base 3: mod_base = OTHER; note = Locked nucleic acid with adenine base
  modified_base 4: mod_base = OTHER; note = Locked nucleic acid with cytosine base
  modified_base 5: mod_base = OTHER; note = Locked nucleic acid with thymine base
  modified_base 11: mod_base = OTHER; note = 2'-deoxy 5-methylcytidine
  modified_base 15: mod_base = OTHER; note = 2'-deoxy 5-methylcytidine
  modified_base 18: mod_base = OTHER; note = Locked nucleic acid with guanine base
  modified_base 19: mod_base = OTHER; note = Locked nucleic acid with adenine base
  modified_base 20: mod_base = OTHER; note = Locked nucleic acid with thymine base
  modified_base 21: mod_base = OTHER; note = Locked nucleic acid with guanine base
  modified_base 22: mod_base = OTHER; note = Locked nucleic acid with adenine base
  misc_feature 1..5: note = RNA
  misc_feature 6..17: note = DNA
  misc_feature 18..22: note = RNA
tgactgtgaacgttcgagatga

SEQ ID NO: 649 - DNA, 20 bp, synthetic construct
  source 1..20: mol_type = other DNA
  modified_base 1: mod_base = OTHER; note = 2'-O-methoxyethyl 5-methylcytidine
  modified_base 2: mod_base = OTHER; note = 2'-O-methoxyethyl 5-methylcytidine
  modified_base 3: mod_base = OTHER; note = 2'-O-methoxyethyl guanosine
  modified_base 4: mod_base = OTHER; note = 2'-O-methoxyethyl guanosine
  modified_base 5: mod_base = OTHER; note = 2'-O-methoxyethyl 5-methylcytidine
  modified_base 16: mod_base = OTHER; note = 2'-O-methoxyethyl guanosine
  modified_base 17: mod_base = OTHER; note = 2'-O-methoxyethyl 5-methylcytidine
  modified_base 18: mod_base = OTHER; note = 2'-O-methoxyethyl adenosine
  modified_base 19: mod_base = OTHER; note = 2'-O-methoxyethyl 5-methylcytidine
  modified_base 20: mod_base = OTHER; note = 2'-O-methoxyethyl adenosine
  misc_feature 1..5: note = RNA
  misc_feature 6..15: note = DNA
  misc_feature 16..20: note = RNA
ccggcagatgagaaggcaca

SEQ ID NO: 650 - DNA, 20 bp, synthetic construct
  source 1..20: mol_type = other DNA
  modified_base 1: mod_base = OTHER; note = 2'-O-methoxyethyl guanosine
  modified_base 2: mod_base = OTHER; note = 2'-O-methoxyethyl 5-methylcytidine
  modified_base 3: mod_base = OTHER; note = 2'-O-methoxyethyl guanosine
  modified_base 4: mod_base = OTHER; note = 2'-O-methoxyethyl adenosine
  modified_base 5: mod_base = OTHER; note = 2'-O-methoxyethyl adenosine
  modified_base 9: mod_base = OTHER; note = 2'-deoxy 5-methylcytidine
  modified_base 11: mod_base = OTHER; note = 2'-deoxy 5-methylcytidine
  modified_base 13: mod_base = OTHER; note = 2'-deoxy 5-methylcytidine
  modified_base 16: mod_base = OTHER; note = 2'-O-methoxyethyl thymidine
  modified_base 17: mod_base = OTHER; note = 2'-O-methoxyethyl 5-methylcytidine
  modified_base 18: mod_base = OTHER; note = 2'-O-methoxyethyl 5-methylcytidine
  modified_base 19: mod_base = OTHER; note = 2'-O-methoxyethyl guanosine
  modified_base 20: mod_base = OTHER; note = 2'-O-methoxyethyl guanosine
  misc_feature 1..5: note = RNA
  misc_feature 6..15: note = DNA
  misc_feature 16..20: note = RNA
gcgaagtgcacacggtccgg

SEQ ID NO: 651 - DNA, 20 bp, synthetic construct
  source 1..20: mol_type = other DNA
  modified_base 1: mod_base = OTHER; note = 2'-O-methoxyethyl guanosine
  modified_base 2: mod_base = OTHER; note = 2'-O-methoxyethyl thymidine
  modified_base 3: mod_base = OTHER; note = 2'-O-methoxyethyl 5-methylcytidine
  modified_base 4: mod_base = OTHER; note = 2'-O-methoxyethyl 5-methylcytidine
  modified_base 5: mod_base = OTHER; note = 2'-O-methoxyethyl guanosine
  modified_base 6: mod_base = OTHER; note = 2'-deoxy 5-methylcytidine
  modified_base 16: mod_base = OTHER; note = 2'-O-methoxyethyl guanosine
  modified_base 17: mod_base = OTHER; note = 2'-O-methoxyethyl guanosine
  modified_base 18: mod_base = OTHER; note = 2'-O-methoxyethyl thymidine
  modified_base 19: mod_base = OTHER; note = 2'-O-methoxyethyl guanosine
  modified_base 20: mod_base = OTHER; note = 2'-O-methoxyethyl 5-methylcytidine
  misc_feature 1..5: note = RNA
  misc_feature 6..15: note = DNA
  misc_feature 16..20: note = RNA
gtccgcgtaaagagaggtgc

SEQ ID NO: 652 - DNA, 20 bp, synthetic construct
  source 1..20: mol_type = other DNA
  modified_base 1: mod_base = OTHER; note = 2'-O-methoxyethyl guanosine
  modified_base 2: mod_base = OTHER; note = 2'-O-methoxyethyl thymidine
  modified_base 3: mod_base = OTHER; note = 2'-O-methoxyethyl guanosine
  modified_base 4: mod_base = OTHER; note = 2'-O-methoxyethyl adenosine
  modified_base 5: mod_base = OTHER; note = 2'-O-methoxyethyl adenosine
  modified_base 7: mod_base = OTHER; note = 2'-deoxy 5-methylcytidine
  modified_base 14: mod_base = OTHER; note = 2'-deoxy 5-methylcytidine
  modified_base 16: mod_base = OTHER; note = 2'-O-methoxyethyl 5-methylcytidine
  modified_base 17: mod_base = OTHER; note = 2'-O-methoxyethyl adenosine
  modified_base 18: mod_base = OTHER; note = 2'-O-methoxyethyl 5-methylcytidine
  modified_base 19: mod_base = OTHER; note = 2'-O-methoxyethyl guanosine
  modified_base 20: mod_base = OTHER; note = 2'-O-methoxyethyl guanosine
  misc_feature 1..5: note = RNA
  misc_feature 6..15: note = DNA
  misc_feature 16..20: note = RNA
gtgaagcgaagtgcacacgg

SEQ ID NO: 653 - DNA, 20 bp, synthetic construct
  source 1..20: mol_type = other DNA
  modified_base 1: mod_base = OTHER; note = 2'-O-methoxyethyl guanosine
  modified_base 2: mod_base = OTHER; note = 2'-O-methoxyethyl thymidine
  modified_base 3: mod_base = OTHER; note = 2'-O-methoxyethyl guanosine
  modified_base 4: mod_base = OTHER; note = 2'-O-methoxyethyl adenosine
  modified_base 5: mod_base = OTHER; note = 2'-O-methoxyethyl adenosine
  modified_base 7: mod_base = OTHER; note = 2'-deoxy 5-methylcytidine
  modified_base 8: mod_base = OTHER; note = 2'-O-methoxyethyl guanosine
  modified_base 14: mod_base = OTHER; note = 2'-deoxy 5-methylcytidine
  modified_base 16: mod_base = OTHER; note = 2'-O-methoxyethyl 5-methylcytidine
  modified_base 17: mod_base = OTHER; note = 2'-O-methoxyethyl adenosine
  modified_base 18: mod_base = OTHER; note = 2'-O-methoxyethyl 5-methylcytidine
  modified_base 19: mod_base = OTHER; note = 2'-O-methoxyethyl guanosine
  modified_base 20: mod_base = OTHER; note = 2'-O-methoxyethyl guanosine
  misc_feature 1..5: note = RNA
  misc_feature 6..7: note = DNA
  misc_feature 8: note = RNA
  misc_feature 9..15: note = DNA
  misc_feature 16..20: note = RNA
gtgaagcgaagtgcacacgg

SEQ ID NO: 654 - DNA, 20 bp, synthetic construct
  source 1..20: mol_type = other DNA
  modified_base 1: mod_base = OTHER; note = 2'-O-methoxyethyl guanosine
  modified_base 2: mod_base = OTHER; note = 2'-O-methoxyethyl thymidine
  modified_base 3: mod_base = OTHER; note = 2'-O-methoxyethyl guanosine
  modified_base 4: mod_base = OTHER; note = 2'-O-methoxyethyl adenosine
  modified_base 5: mod_base = OTHER; note = 2'-O-methoxyethyl adenosine
  modified_base 7: mod_base = OTHER; note = 2'-deoxy 5-methylcytidine
  modified_base 10: mod_base = OTHER; note = 2'-O-methoxyethyl adenosine
  modified_base 14: mod_base = OTHER; note = 2'-deoxy 5-methylcytidine
  modified_base 16: mod_base = OTHER; note = 2'-O-methoxyethyl 5-methylcytidine
  modified_base 17: mod_base = OTHER; note = 2'-O-methoxyethyl adenosine
  modified_base 18: mod_base = OTHER; note = 2'-O-methoxyethyl 5-methylcytidine
  modified_base 19: mod_base = OTHER; note = 2'-O-methoxyethyl guanosine
  modified_base 20: mod_base = OTHER; note = 2'-O-methoxyethyl guanosine
  misc_feature 1..5: note = RNA
  misc_feature 6..9: note = DNA
  misc_feature 10: note = RNA
  misc_feature 11..15: note = DNA
  misc_feature 16..20: note = RNA
gtgaagcgaagtgcacacgg

SEQ ID NO: 655 - DNA, 20 bp, synthetic construct
  source 1..20: mol_type = other DNA
  modified_base 1: mod_base = OTHER; note = 2'-O-methoxyethyl guanosine
  modified_base 2: mod_base = OTHER; note = 2'-O-methoxyethyl thymidine
  modified_base 3: mod_base = OTHER; note = 2'-O-methoxyethyl guanosine
  modified_base 4: mod_base = OTHER; note = 2'-O-methoxyethyl adenosine
  modified_base 5: mod_base = OTHER; note = 2'-O-methoxyethyl adenosine
  modified_base 7: mod_base = OTHER; note = 2'-deoxy 5-methylcytidine
  modified_base 11: mod_base = OTHER; note = 2'-O-methoxyethyl guanosine
  modified_base 14: mod_base = OTHER; note = 2'-deoxy 5-methylcytidine
  modified_base 16: mod_base = OTHER; note = 2'-O-methoxyethyl 5-methylcytidine
  modified_base 17: mod_base = OTHER; note = 2'-O-methoxyethyl adenosine
  modified_base 18: mod_base = OTHER; note = 2'-O-methoxyethyl 5-methylcytidine
  modified_base 19: mod_base = OTHER; note = 2'-O-methoxyethyl guanosine
  modified_base 20: mod_base = OTHER; note = 2'-O-methoxyethyl guanosine
  misc_feature 1..5: note = RNA
  misc_feature 6..10: note = DNA
  misc_feature 11: note = RNA
  misc_feature 12..15: note = DNA
  misc_feature 16..20: note = RNA
gtgaagcgaagtgcacacgg

SEQ ID NO: 656 - DNA, 20 bp, synthetic construct
  source 1..20: mol_type = other DNA
  modified_base 1: mod_base = OTHER; note = 2'-O-methoxyethyl guanosine
  modified_base 2: mod_base = OTHER; note = 2'-O-methoxyethyl thymidine
  modified_base 3: mod_base = OTHER; note = 2'-O-methoxyethyl guanosine
  modified_base 4: mod_base = OTHER; note = 2'-O-methoxyethyl adenosine
  modified_base 5: mod_base = OTHER; note = 2'-O-methoxyethyl adenosine
  modified_base 7: mod_base = OTHER; note = 2'-deoxy 5-methylcytidine
  modified_base 8: mod_base = OTHER; note = 2'-O-methoxyethyl guanosine
  modified_base 11: mod_base = OTHER; note = 2'-O-methoxyethyl guanosine
  modified_base 14: mod_base = OTHER; note = 2'-deoxy 5-methylcytidine
  modified_base 16: mod_base = OTHER; note = 2'-O-methoxyethyl 5-methylcytidine
  modified_base 17: mod_base = OTHER; note = 2'-O-methoxyethyl adenosine
  modified_base 18: mod_base = OTHER; note = 2'-O-methoxyethyl 5-methylcytidine
  modified_base 19: mod_base = OTHER; note = 2'-O-methoxyethyl guanosine
  modified_base 20: mod_base = OTHER; note = 2'-O-methoxyethyl guanosine
  misc_feature 1..5: note = RNA
  misc_feature 6..7: note = DNA
  misc_feature 8: note = RNA
  misc_feature 9..10: note = DNA
  misc_feature 11: note = RNA
  misc_feature 12..15: note = DNA
  misc_feature 16..20: note = RNA
gtgaagcgaagtgcacacgg

SEQ ID NO: 657 - DNA, 20 bp, synthetic construct
  source 1..20: mol_type = other DNA
  modified_base 1: mod_base = OTHER; note = 2'-O-methoxyethyl guanosine
  modified_base 2: mod_base = OTHER; note = 2'-O-methoxyethyl 5-methylcytidine
  modified_base 3: mod_base = OTHER; note = 2'-O-methoxyethyl adenosine
  modified_base 4: mod_base = OTHER; note = 2'-O-methoxyethyl guanosine
  modified_base 5: mod_base = OTHER; note = 2'-O-methoxyethyl adenosine
  modified_base 13: mod_base = OTHER; note = 2'-deoxy 5-methylcytidine
  modified_base 16: mod_base = OTHER; note = 2'-O-methoxyethyl adenosine
  modified_base 17: mod_base = OTHER; note = 2'-O-methoxyethyl guanosine
  modified_base 18: mod_base = OTHER; note = 2'-O-methoxyethyl thymidine
  modified_base 19: mod_base = OTHER; note = 2'-O-methoxyethyl guanosine
  modified_base 20: mod_base = OTHER; note = 2'-O-methoxyethyl 5-methylcytidine
  misc_feature 1..5: note = RNA
  misc_feature 6..15: note = DNA
  misc_feature 16..20: note = RNA
gcagaggtgaagcgaagtgc

SEQ ID NO: 658 - DNA, 20 bp, synthetic construct
  source 1..20: mol_type = other DNA
  modified_base 1: mod_base = OTHER; note = 2'-O-methoxyethyl guanosine
  modified_base 2: mod_base = OTHER; note = 2'-O-methoxyethyl 5-methylcytidine
  modified_base 3: mod_base = OTHER; note = 2'-O-methoxyethyl adenosine
  modified_base 4: mod_base = OTHER; note = 2'-O-methoxyethyl guanosine
  modified_base 10: mod_base = OTHER; note = 2'-O-methoxyethyl adenosine
  modified_base 13: mod_base = OTHER; note = 2'-deoxy 5-methylcytidine
  modified_base 16: mod_base = OTHER; note = 2'-O-methoxyethyl adenosine
  modified_base 17: mod_base = OTHER; note = Locked nucleic acid with guanine base
  modified_base 18: mod_base = OTHER; note = 2'-O-methoxyethyl thymidine
  modified_base 19: mod_base = OTHER; note = Locked nucleic acid with guanine base
  modified_base 20: mod_base = OTHER; note = Locked nucleic acid with 5-methylcytidine base
  misc_feature 1..4: note = RNA
  misc_feature 5..9: note = DNA
  misc_feature 10: note = RNA
  misc_feature 11..15: note = DNA
  misc_feature 16..20: note = RNA
gcagaggtgaagcgaagtgc

SEQ ID NO: 659 - DNA, 20 bp, synthetic construct
  source 1..20: mol_type = other DNA
  modified_base 1: mod_base = OTHER; note = 2'-O-methoxyethyl guanosine
  modified_base 2: mod_base = OTHER; note = 2'-O-methoxyethyl 5-methylcytidine
  modified_base 3: mod_base = OTHER; note = 2'-O-methoxyethyl adenosine
  modified_base 4: mod_base = OTHER; note = 2'-O-methoxyethyl guanosine
  modified_base 10: mod_base = OTHER; note = 2'-O-methoxyethyl adenosine
  modified_base 13: mod_base = OTHER; note = 2'-deoxy 5-methylcytidine
  modified_base 16: mod_base = OTHER; note = 2'-O-methoxyethyl adenosine
  modified_base 17: mod_base = OTHER; note = Locked nucleic acid with guanine base
  modified_base 18: mod_base = OTHER; note = 2'-O-methoxyethyl thymidine
  modified_base 19: mod_base = OTHER; note = Locked nucleic acid with guanine base
  modified_base 20: mod_base = OTHER; note = Locked nucleic acid with 5-methylcytidine base
  misc_feature 1..4: note = RNA
  misc_feature 5..9: note = DNA
  misc_feature 10: note = RNA
  misc_feature 11..15: note = DNA
  misc_feature 16..20: note = RNA
gcagaggtgaagcgaagtgc

SEQ ID NO: 660 - RNA, 40 nt, synthetic construct
  source 1..40: mol_type = other RNA
  modified_base 1: mod_base = OTHER; note = 2'-O-methyl adenosine
  modified_base 2: mod_base = OTHER; note = 2'-O-methyl 5-methylcytidine
  modified_base 3: mod_base = OTHER; note = 2'-O-methyl adenosine
  modified_base 4: mod_base = OTHER; note = 2'-O-methyl 5-methylcytidine
  modified_base 5: mod_base = OTHER; note = 2'-O-methyl adenosine
  modified_base 6: mod_base = OTHER; note = 2'-O-methyl 5-methylcytidine
  modified_base 7: mod_base = OTHER; note = 2'-O-methyl adenosine
  modified_base 8: mod_base = OTHER; note = 2'-O-methyl 5-methylcytidine
  modified_base 9: mod_base = OTHER; note = 2'-O-methyl adenosine
  modified_base 10: mod_base = OTHER; note = 2'-O-methyl 5-methylcytidine
  modified_base 11: mod_base = OTHER; note = 2'-O-methyl adenosine
  modified_base 12: mod_base = OTHER; note = 2'-O-methyl 5-methylcytidine
  modified_base 13: mod_base = OTHER; note = 2'-O-methyl adenosine
  modified_base 14: mod_base = OTHER; note = 2'-O-methyl 5-methylcytidine
  modified_base 15: mod_base = OTHER; note = 2'-O-methyl adenosine
  modified_base 16: mod_base = OTHER; note = 2'-O-methyl 5-methylcytidine
  modified_base 17: mod_base = OTHER; note = 2'-O-methyl adenosine
  modified_base 18: mod_base = OTHER; note = 2'-O-methyl 5-methylcytidine
  modified_base 19: mod_base = OTHER; note = 2'-O-methyl adenosine
  modified_base 20: mod_base = OTHER; note = 2'-O-methyl 5-methylcytidine
  modified_base 21: mod_base = OTHER; note = 2'-O-methyl adenosine
  modified_base 22: mod_base = OTHER; note = 2'-O-methyl 5-methylcytidine
  modified_base 23: mod_base = OTHER; note = 2'-O-methyl adenosine
  modified_base 24: mod_base = OTHER; note = 2'-O-methyl 5-methylcytidine
  modified_base 25: mod_base = OTHER; note = 2'-O-methyl adenosine
  modified_base 26: mod_base = OTHER; note = 2'-O-methyl 5-methylcytidine
  modified_base 27: mod_base = OTHER; note = 2'-O-methyl adenosine
  modified_base 28: mod_base = OTHER; note = 2'-O-methyl 5-methylcytidine
  modified_base 29: mod_base = OTHER; note = 2'-O-methyl adenosine
  modified_base 30: mod_base = OTHER; note = 2'-O-methyl 5-methylcytidine
  modified_base 31: mod_base = OTHER; note = 2'-O-methyl adenosine
  modified_base 32: mod_base = OTHER; note = 2'-O-methyl 5-methylcytidine
  modified_base 33: mod_base = OTHER; note = 2'-O-methyl adenosine
  modified_base 34: mod_base = OTHER; note = 2'-O-methyl 5-methylcytidine
  modified_base 35: mod_base = OTHER; note = 2'-O-methyl adenosine
  modified_base 36: mod_base = OTHER; note = 2'-O-methyl 5-methylcytidine
  modified_base 37: mod_base = OTHER; note = 2'-O-methyl adenosine
  modified_base 38: mod_base = OTHER; note = 2'-O-methyl 5-methylcytidine
  modified_base 39: mod_base = OTHER; note = 2'-O-methyl adenosine
  modified_base 40: mod_base = OTHER; note = 2'-O-methyl 5-methylcytidine
acacacacacacacacacacacacacacacacacacacac

SEQ ID NO: 661 - RNA, 40 nt, synthetic construct; identical to SEQ ID NO: 660
  source 1..40: mol_type = other RNA
  modified_base 1: mod_base = OTHER; note = 2'-O-methyl adenosine
  modified_base 2: mod_base = OTHER; note = 2'-O-methyl 5-methylcytidine
  modified_base 3: mod_base = OTHER; note = 2'-O-methyl adenosine
  modified_base 4: mod_base = OTHER; note = 2'-O-methyl 5-methylcytidine
  modified_base 5: mod_base = OTHER; note = 2'-O-methyl adenosine
  modified_base 6: mod_base = OTHER; note = 2'-O-methyl 5-methylcytidine
  modified_base 7: mod_base = OTHER; note = 2'-O-methyl adenosine
  modified_base 8: mod_base = OTHER; note = 2'-O-methyl 5-methylcytidine
  modified_base 9: mod_base = OTHER; note = 2'-O-methyl adenosine
  modified_base 10: mod_base = OTHER; note = 2'-O-methyl 5-methylcytidine
  modified_base 11: mod_base = OTHER; note = 2'-O-methyl adenosine
  modified_base 12: mod_base = OTHER; note = 2'-O-methyl 5-methylcytidine
  modified_base 13: mod_base = OTHER; note = 2'-O-methyl adenosine
  modified_base 14: mod_base = OTHER; note = 2'-O-methyl 5-methylcytidine
  modified_base 15: mod_base = OTHER; note = 2'-O-methyl adenosine
  modified_base 16: mod_base = OTHER; note = 2'-O-methyl 5-methylcytidine
  modified_base 17: mod_base = OTHER; note = 2'-O-methyl adenosine
  modified_base 18: mod_base = OTHER; note = 2'-O-methyl 5-methylcytidine
  modified_base 19: mod_base = OTHER; note = 2'-O-methyl adenosine
  modified_base 20: mod_base = OTHER; note = 2'-O-methyl 5-methylcytidine
  modified_base 21: mod_base = OTHER; note = 2'-O-methyl adenosine
  modified_base 22: mod_base = OTHER; note = 2'-O-methyl 5-methylcytidine
  modified_base 23: mod_base = OTHER; note = 2'-O-methyl adenosine
  modified_base 24: mod_base = OTHER; note = 2'-O-methyl 5-methylcytidine
  modified_base 25: mod_base = OTHER; note = 2'-O-methyl adenosine
  modified_base 26: mod_base = OTHER; note = 2'-O-methyl 5-methylcytidine
  modified_base 27: mod_base = OTHER; note = 2'-O-methyl adenosine
  modified_base 28: mod_base = OTHER; note = 2'-O-methyl 5-methylcytidine
  modified_base 29: mod_base = OTHER; note = 2'-O-methyl adenosine
  modified_base 30: mod_base = OTHER; note = 2'-O-methyl 5-methylcytidine
  modified_base 31: mod_base = OTHER; note = 2'-O-methyl adenosine
  modified_base 32: mod_base = OTHER; note = 2'-O-methyl 5-methylcytidine
  modified_base 33: mod_base = OTHER; note = 2'-O-methyl adenosine
  modified_base 34: mod_base = OTHER; note = 2'-O-methyl 5-methylcytidine
  modified_base 35: mod_base = OTHER; note = 2'-O-methyl adenosine
  modified_base 36: mod_base = OTHER; note = 2'-O-methyl 5-methylcytidine
  modified_base 37: mod_base = OTHER; note = 2'-O-methyl adenosine
  modified_base 38: mod_base = OTHER; note = 2'-O-methyl 5-methylcytidine
  modified_base 39: mod_base = OTHER; note = 2'-O-methyl adenosine
  modified_base 40: mod_base = OTHER; note = 2'-O-methyl 5-methylcytidine

SEQ ID NO: 662 - DNA, 40 bp, synthetic construct
  source 1..40: mol_type = other DNA
  modified_base 2: mod_base = OTHER; note = 2'-deoxy cytidine
  modified_base 4: mod_base = OTHER; note = 2'-deoxy cytidine
  modified_base 6: mod_base = OTHER; note = 2'-deoxy cytidine
  modified_base 8: mod_base = OTHER; note = 2'-deoxy cytidine
  modified_base 10: mod_base = OTHER; note = 2'-deoxy cytidine
  modified_base 12: mod_base = OTHER; note = 2'-deoxy cytidine
  modified_base 14: mod_base = OTHER; note = 2'-deoxy cytidine
  modified_base 16: mod_base = OTHER; note = 2'-deoxy cytidine
  modified_base 18: mod_base = OTHER; note = 2'-deoxy cytidine
  modified_base 20: mod_base = OTHER; note = 2'-deoxy cytidine
  modified_base 22: mod_base = OTHER; note = 2'-deoxy cytidine
  modified_base 24: mod_base = OTHER; note = 2'-deoxy cytidine
  modified_base 26: mod_base = OTHER; note = 2'-deoxy cytidine
  modified_base 28: mod_base = OTHER; note = 2'-deoxy cytidine
  modified_base 30: mod_base = OTHER; note = 2'-deoxy cytidine
  modified_base 32: mod_base = OTHER; note = 2'-deoxy cytidine
  modified_base 34: mod_base = OTHER; note = 2'-deoxy cytidine
  modified_base 36: mod_base = OTHER; note = 2'-deoxy cytidine
  modified_base 38: mod_base = OTHER; note = 2'-deoxy cytidine
  modified_base 40: mod_base = OTHER; note = 2'-deoxy cytidine
acacacacacacacacacacacacacacacacacacacac

SEQ ID NO: 663 - DNA, 40 bp, synthetic construct
  source 1..40: mol_type = other DNA
  modified_base 2: mod_base = OTHER; note = 2'-deoxy 5-methylcytidine
  modified_base 13: mod_base = OTHER; note = 2'-deoxy 5-methylcytidine
  modified_base 17: mod_base = OTHER; note = 2'-deoxy 5-methylcytidine
  modified_base 19: mod_base = OTHER; note = 2'-deoxy 5-methylcytidine
  modified_base 21: mod_base = OTHER; note = 2'-deoxy 5-methylcytidine
  modified_base 23: mod_base = OTHER; note = 2'-deoxy 5-methylcytidine
  modified_base 26: mod_base = OTHER; note = 2'-deoxy 5-methylcytidine
  modified_base 37: mod_base = OTHER; note = 2'-deoxy 5-methylcytidine
gcagaggtgaagcgaacacacacagcagaggtgaagcgaa

SEQ ID NO: 664 - RNA, 40 nt, synthetic construct; identical to SEQ ID NO: 660
  source 1..40: mol_type = other RNA
  modified_base 1: mod_base = OTHER; note = 2'-O-methoxyethyl adenosine
  modified_base 2: mod_base = OTHER; note = 2'-O-methoxyethyl 5-methylcytidine
  modified_base 3: mod_base = OTHER; note = 2'-O-methoxyethyl adenosine
  modified_base 4: mod_base = OTHER; note = 2'-O-methoxyethyl 5-methylcytidine
  modified_base 5: mod_base = OTHER; note = 2'-O-methoxyethyl adenosine
  modified_base 6: mod_base = OTHER; note = 2'-O-methoxyethyl 5-methylcytidine
  modified_base 7: mod_base = OTHER; note = 2'-O-methoxyethyl adenosine
  modified_base 8: mod_base = OTHER; note = 2'-O-methoxyethyl 5-methylcytidine
  modified_base 9: mod_base = OTHER; note = 2'-O-methoxyethyl adenosine
  modified_base 10: mod_base = OTHER; note = 2'-O-methoxyethyl 5-methylcytidine
  modified_base 11: mod_base = OTHER; note = 2'-O-methoxyethyl adenosine
  modified_base 12: mod_base = OTHER; note = 2'-O-methoxyethyl 5-methylcytidine
  modified_base 13: mod_base = OTHER; note = 2'-O-methoxyethyl adenosine
  modified_base 14: mod_base = OTHER; note = 2'-O-methoxyethyl 5-methylcytidine
  modified_base 15: mod_base = OTHER; note = 2'-O-methoxyethyl adenosine
  modified_base 16: mod_base = OTHER; note = 2'-O-methoxyethyl 5-methylcytidine
  modified_base 17: mod_base = OTHER; note = 2'-O-methoxyethyl adenosine
  modified_base 18: mod_base = OTHER; note = 2'-O-methoxyethyl 5-methylcytidine
  modified_base 19: mod_base = OTHER; note = 2'-O-methoxyethyl adenosine
  modified_base 20: mod_base = OTHER; note = 2'-O-methoxyethyl 5-methylcytidine
  modified_base 21: mod_base = OTHER; note = 2'-O-methoxyethyl adenosine
  modified_base 22: mod_base = OTHER; note = 2'-O-methoxyethyl 5-methylcytidine
  modified_base 23: mod_base = OTHER; note = 2'-O-methoxyethyl adenosine
  modified_base 24: mod_base = OTHER; note = 2'-O-methoxyethyl 5-methylcytidine
  modified_base 25: mod_base = OTHER; note = 2'-O-methoxyethyl adenosine
  modified_base 26: mod_base = OTHER; note = 2'-O-methoxyethyl 5-methylcytidine
  modified_base 27: mod_base = OTHER; note = 2'-O-methoxyethyl adenosine
  modified_base 28: mod_base = OTHER; note = 2'-O-methoxyethyl 5-methylcytidine
  modified_base 29: mod_base = OTHER; note = 2'-O-methoxyethyl adenosine
  modified_base 30: mod_base = OTHER; note = 2'-O-methoxyethyl 5-methylcytidine
  modified_base 31: mod_base = OTHER; note = 2'-O-methoxyethyl adenosine
  modified_base 32: mod_base = OTHER; note = 2'-O-methoxyethyl 5-methylcytidine
  modified_base 33: mod_base = OTHER; note = 2'-O-methoxyethyl adenosine
  modified_base 34: mod_base = OTHER; note = 2'-O-methoxyethyl 5-methylcytidine
  modified_base 35: mod_base = OTHER; note = 2'-O-methoxyethyl adenosine
  modified_base 36: mod_base = OTHER; note = 2'-O-methoxyethyl 5-methylcytidine
  modified_base 37: mod_base = OTHER; note = 2'-O-methoxyethyl adenosine
  modified_base 38: mod_base = OTHER; note = 2'-O-methoxyethyl 5-methylcytidine
  modified_base 39: mod_base = OTHER; note = 2'-O-methoxyethyl adenosine
  modified_base 40: mod_base = OTHER; note = 2'-O-methoxyethyl 5-methylcytidine

SEQ ID NO: 665 - RNA, 40 nt, synthetic construct; identical to SEQ ID NO: 660
  source 1..40: mol_type = other RNA
  modified_base 1: mod_base = OTHER; note = Locked nucleic acid with adenine base
  modified_base 2: mod_base = OTHER; note = Locked nucleic acid with 5-methylcytidine base
  modified_base 3: mod_base = OTHER; note = Locked nucleic acid with adenine base
  modified_base 4: mod_base = OTHER; note = Locked nucleic acid with 5-methylcytidine base
  modified_base 5: mod_base = OTHER; note = Locked nucleic acid with adenine base
  modified_base 6: mod_base = OTHER; note = Locked nucleic acid with 5-methylcytidine base
  modified_base 7: mod_base = OTHER; note = Locked nucleic acid with adenine base
  modified_base 8: mod_base = OTHER; note = Locked nucleic acid with 5-methylcytidine base
  modified_base 9: mod_base = OTHER; note = Locked nucleic acid with adenine base
  modified_base 10: mod_base = OTHER; note = Locked nucleic acid with 5-methylcytidine base
  modified_base 11: mod_base = OTHER; note = Locked nucleic acid with adenine base
  modified_base 12: mod_base = OTHER; note = Locked nucleic acid with 5-methylcytidine base
  modified_base 13: mod_base = OTHER; note = Locked nucleic acid with adenine base
  modified_base 14: mod_base = OTHER; note = Locked nucleic acid with 5-methylcytidine base
  modified_base 15: mod_base = OTHER; note = Locked nucleic acid with adenine base
  modified_base 16: mod_base = OTHER; note = Locked nucleic acid with 5-methylcytidine base
  modified_base 17: mod_base = OTHER; note = Locked nucleic acid with adenine base
  modified_base 18: mod_base = OTHER; note = Locked nucleic acid with 5-methylcytidine base
  modified_base 19: mod_base = OTHER; note = Locked nucleic acid with adenine base
  modified_base 20: mod_base = OTHER; note = Locked nucleic acid with 5-methylcytidine base
  modified_base 21: mod_base = OTHER; note = Locked nucleic acid with adenine base
  modified_base 22: mod_base = OTHER; note = Locked nucleic acid with 5-methylcytidine base
  modified_base 23: mod_base = OTHER; note = Locked nucleic acid with adenine base
  modified_base 24: mod_base = OTHER; note = Locked nucleic acid with 5-methylcytidine base
  modified_base 25: mod_base = OTHER; note = Locked nucleic acid with adenine base
  modified_base 26: mod_base = OTHER; note = Locked nucleic acid with 5-methylcytidine base
  modified_base 27: mod_base = OTHER; note = Locked nucleic acid with adenine base
  modified_base 28: mod_base = OTHER; note = Locked nucleic acid with 5-methylcytidine base
  modified_base 29: mod_base = OTHER; note = Locked nucleic acid with adenine base
  modified_base 30: mod_base = OTHER; note = Locked nucleic acid with 5-methylcytidine base
  modified_base 31: mod_base = OTHER; note = Locked nucleic acid with adenine base
  modified_base 32: mod_base = OTHER; note = Locked nucleic acid with 5-methylcytidine base
  modified_base 33: mod_base = OTHER; note = Locked nucleic acid with adenine base
  modified_base 34: mod_base = OTHER; note = Locked nucleic acid with 5-methylcytidine base
  modified_base 35: mod_base = OTHER; note = Locked nucleic acid with adenine base
  modified_base 36: mod_base = OTHER; note = Locked nucleic acid with 5-methylcytidine base
  modified_base 37: mod_base = OTHER; note = Locked nucleic acid with adenine base
  modified_base 38: mod_base = OTHER; note = Locked nucleic acid with 5-methylcytidine base
  modified_base 39: mod_base = OTHER; note = Locked nucleic acid with adenine base
  modified_base 40: mod_base = OTHER; note = Locked nucleic acid with 5-methylcytidine base

SEQ ID NO: 666 - RNA, 40 nt, synthetic construct; identical to SEQ ID NO: 660
  source 1..40: mol_type = other RNA
  modified_base 1: mod_base = OTHER; note = 2'-O-methoxyethyl adenosine
  modified_base 2: mod_base = OTHER; note = Locked nucleic acid with 5-methylcytidine base
  modified_base 3: mod_base = OTHER; note = 2'-O-methoxyethyl adenosine
  modified_base 4: mod_base = OTHER; note = Locked nucleic acid with 5-methylcytidine base
  modified_base 5: mod_base = OTHER; note = 2'-O-methoxyethyl adenosine
  modified_base 6: mod_base = OTHER; note = Locked nucleic acid with 5-methylcytidine base
  modified_base 7: mod_base = OTHER; note = 2'-O-methoxyethyl adenosine
  modified_base 8: mod_base = OTHER; note = Locked nucleic acid with 5-methylcytidine base
  modified_base 9: mod_base = OTHER; note = 2'-O-methoxyethyl adenosine
  modified_base 10: mod_base = OTHER; note = Locked nucleic acid with 5-methylcytidine base
  modified_base 11: mod_base = OTHER; note = 2'-O-methoxyethyl adenosine
  modified_base 12: mod_base = OTHER; note = Locked nucleic acid with 5-methylcytidine base
  modified_base 13: mod_base = OTHER; note = 2'-O-methoxyethyl adenosine
  modified_base 14: mod_base = OTHER; note = Locked nucleic acid with 5-methylcytidine base
  modified_base 15: mod_base = OTHER; note = 2'-O-methoxyethyl adenosine
  modified_base 16: mod_base = OTHER; note = Locked nucleic acid with 5-methylcytidine base
  modified_base 17: mod_base = OTHER; note = 2'-O-methoxyethyl adenosine
  modified_base 18: mod_base = OTHER; note = Locked nucleic acid with 5-methylcytidine base
  modified_base 19: mod_base = OTHER; note = 2'-O-methoxyethyl adenosine
  modified_base 20: mod_base = OTHER; note = Locked nucleic acid with 5-methylcytidine base
  modified_base 21: mod_base = OTHER; note = 2'-O-methoxyethyl adenosine
  modified_base 22: mod_base = OTHER; note = Locked nucleic acid with 5-methylcytidine base
  modified_base 23: mod_base = OTHER; note = 2'-O-methoxyethyl adenosine
  modified_base 24: mod_base = OTHER; note = Locked nucleic acid with 5-methylcytidine base
  modified_base 25: mod_base = OTHER; note = 2'-O-methoxyethyl adenosine
  modified_base 26: mod_base = OTHER; note = Locked nucleic acid with 5-methylcytidine base
  modified_base 27: mod_base = OTHER; note = 2'-O-methoxyethyl adenosine
  modified_base 28: mod_base = OTHER; note = Locked nucleic acid with 5-methylcytidine base
  modified_base 29: mod_base = OTHER; note = 2'-O-methoxyethyl adenosine
  modified_base 30: mod_base = OTHER; note = Locked nucleic acid with 5-methylcytidine base
  modified_base 31: mod_base = OTHER; note = 2'-O-methoxyethyl adenosine
  modified_base 32: mod_base = OTHER; note = Locked nucleic acid with 5-methylcytidine base
  modified_base 33: mod_base = OTHER; note = 2'-O-methoxyethyl adenosine
  modified_base 34: mod_base = OTHER; note = Locked nucleic acid with 5-methylcytidine base
  modified_base 35: mod_base = OTHER; note = 2'-O-methoxyethyl adenosine
  modified_base 36: mod_base = OTHER; note = Locked nucleic acid with 5-methylcytidine base
  modified_base 37: mod_base = OTHER; note = 2'-O-methoxyethyl adenosine
  modified_base 38: mod_base = OTHER; note = Locked nucleic acid with 5-methylcytidine base
  modified_base 39: mod_base = OTHER; note = 2'-O-methoxyethyl adenosine
  modified_base 40: mod_base = OTHER; note = Locked nucleic acid with 5-methylcytidine base

SEQ ID NO: 667 - DNA, 3221 bp, Hepatitis B virus
  source 1..3221: mol_type = genomic DNA
ttccactgccttccaccaagcactgcaggatcccagagtcaggggtccgtattttcctgctggtggctccagttcaggaacagtaaaccctgctccgaatattgcctctcacatctcgtcaatctccgcgaggactggggaccctgtgacgaacatggagaacatcacatcaggactcctaggacccctgctcgtgttacaggcggggtttttcttgttgacaagaatcctcacaataccgcagagtctaggctcgtggtggacttctctcaattttctagggggatcacccgtgtgtcttggccaaaattcgcagtccccaacctccaatcactcaccaacctcctgtcctccaatttgtcctggttatcgttggatgtgtctgcggcgttttatcatattcctcttcatcctgctgctatgcctcatcttcttattggttcttctggattatcaaggtatgttgcccgtttgtcctctaattccaggatcaacaacaaccggtacgggaccatgcaaaacctgcacgactcctgctcaaggcaactctatgtttccctcatgttgctgtacaaaacctacggacggaaattgcacctgtattcccatcccatcgtcctgggctttcgcaaaatacctatgggagtgggcctcagtccgtttctcttggctcagtttactagtgccatttgttcagtggttcgtagggctttcccccactgtttggctttcagctatatggatgatgtggtattgggggccaagactgtacagcatcgtgagtccctttataccgctgttaccaattttcttttgtctctgggtatacatttaaaccctaacaaaacaaaaagatggggttattccctaaacttcatgggttacataattggaagttggggaactttgccacaggatcatattgtacaaaagatcaaacactgttttagaaaacttcctgttaacaggcctattgattggaaagtatgtcaaagaattgtgggtcttttgggctttgctgctccatttacacaatgtggatatcctgccttaatgcctttgtatgcatgtatacaagctaaacaggctttcactttctcgccaacttacaaggcctttctaagtaaacagtacatgaacctttaccccgttgctcggcaacggcctggtctgtgccaagtgtttgctgacgcaacccccactggctggggcttggccataggccatcagcgcatgcgtggaacctttgtggctcctctgccgatccatactgcggaactcctagccgcttgttttgctcgcagccggtctggagcaaagctcatcggaactgacaattctgtcgtcctctcgcggaaatatacatcgtttccatggctgctaggctgtactgccaactggatccttcgcgggacgtcctttgtttacgtcccgtcggcgctgaatcccgcggacgacccctctcggggccgcttgggactctatcgtccccttctccgtctgccgttccagccgaccacggggcgcacctctctttacgcggtctccccgtctgtgccttctcatctgccggtccgtgtgcacttcgcttcacctctgcacgttgcatggagaccaccgtgaacgcccatcagatcctgcccaaggtcttacataagaggactcttggactcccagcaatgtcaacgaccgaccttgaggcctacttcaaagactgtgtgtttaaggactgggaggagctgggggaggagagtaggttaatgatctttgtattaggaggctgtaggcataaattggtctgcgcaccagcaccatgcaactttttcacctctgccaaatcatctcttgtacatgtcccactgttcaagcctccaagctgtgccttgggtggctttggggcatggacattgacccttataaagaatttggagctactgttgagttactctcgtttttgccttctgacttctttccttccgtcagagatcttctagacaccgcctcagctctgtatcgagaagccttagagtctcctgagcactgctcacctcaccatactgcactcaggcaagccattctctgctggggggaattgatgactctagctacctgggtgggtaataatttggatgatccagcatccagggatctagtagtcaattatgttaatactaacatgggtttaaagatcaggcaactattgtggtttcatatatcttgccttacttttggaagagagactgtacttgaatatttggtctctttcggagtgtggattcgcactcctccaccctatagaccaccaaatgcccctatcttatcaacacttccggaaactactgttattagacgacgggaccgaggcaggtcccctagaagaagaactccctcgcctcgcagacgcagatctcaatcgccgcgtcgcagaagatctcaatctcgggaatctcaatgttagtattccttggactcataaggtgggaaactttacggggctttattcctctacagtacctatctttaatcctgaatggcaaactccttcctttcctaagattcatttacaagaggacattattaataggtgtcaacaatttgtgggccctctcactgtaaatgaaaagagaagattgaaattaattatgcctgctagattctatcctacccacactaaatatttgcccttagacaaaggaattaaaccttattatccagatcaggtagttaatcattacttccaaaccagacattatttacatactctttggaaggcgggtattctatataagagggaaaccacacgtagcgcatcattttgcgggtcaccatattcttgggaacaagagctacagcatgggaggttggtcatcaaaacctcgcaaaggcatggggacgaatctttctgttcccaaccctctgggattctttcccgatcatcagttggaccctgcattcggagccaactcaaacaatccagattgggacttcaaccccatcaaggaccactggccagcagccaaccaggtgggagtgggggcattcgggccagggctcacccctccacacggcggtatcttggggtggagccctcaggctcagggcatattgaccacagtgtcaacaattcctcctcctgcctccaccaatcggcagtcaggaaggcagcctactcccatctctccacctctccgagacagtcatcctcaggccacgcagtggaa

SEQ ID NO: 668 - DNA, 3215 bp, Hepatitis B virus
  source 1..3215: mol_type = genomic DNA
ctccaccactttccaccaaactcttcaagatcccggagtcagggccctgtactttcctgctggtggctccagttcaggaacagtgagccctgctcagaatactgtctctgccatatcgtcaatcttatcgaagactggggaccctgtaccgaacatggagaacatcgcatcaggactcctaggacccctgctcgtgttacaggcggggtttttcttgttgacaaaaatcctcacaataccacagagtctagactcgtggtggacttctctcaattttctagggggaacacccgtgtgtcttggccaaaattcgcagtcccaaatctccagtcactcaccaacctgttgtcctccaatttgtcctggttatcgctggatgtgtctgcggcgttttatcatcttcctctgcatcctgctgctatgcctcatcttcttgttggttcttctggactatcaaggtatgttgcccgtttgtcctctaattccaggatcatcaacaaccagcaccggaccatgcaaaacctgcacaactcctgctcaaggaacctctatgtttccctcatgttgctgtacaaaacctacggatggaaactgcacctgtattcccatcccatcatcttgggctttcgcaaaatacctatgggagtgggcctcagtccgtttctcttggctcagtttactagtgccatttgttcagtggttcgtagggctttcccccactgtctggctttcagttatatggatgatatggttttgggggccaagtctgtacaacatcttgagtccctttatgccgctgttaccaattttcttttgtctttgggtatacatttaaaccctcacaaaacaaaaagatggggatattcccttaacttcatgggatatgtaattgggagctggggcacattgccacaggaacatattgtacaaaaaatcaaaatgtggtttaggaaacttcctgtaaacaggcctattgattggaaagtatgtcaacgaattgtgggtcttttggggtttgccgcccctttcacgcaatgtggatatcctgctttaatgcctttatatgcatgtatacaagcaaaacaggcttttactttctcgccaacttacaaggcctttctaactaaacagtatctgaacctttaccccgttgctcggcaacggccaggtctgtgccaagtgtttgctgacgcaacccccactggttggggcttggccataggccatcagcgcatgcgtggaacctttgtgtctcctctgccgatccatactgcggaactcctagccgcttgttttgctcgcagccggtctggggcaaaactcatcgggactgacaattctgtcgtgctctcccgcaagtatacatcatttccatggctgctaggctgtgctgccaactggatcctgcgcgggacgtcctttgtttacgtcccgtcggcgctgaatcccgcggacgacccttcccggggccgcttggggctctaccgcccgcttctccgcctgttgtaccgaccgaccacggggcgcacctctctttacgcggactccccgtctgtgccttctcatctgccggaccgtgtgcacttcgcttcacctctgcacgtcgcatggagaccaccgtgaacgcccacgggaacctgcccaaggtcttgcataagaggactcttggactttcagcaatgtcaacgaccgaccttgaggcatacttcaaagactgtgtgtttaatgagtgggaggagttgggggaggaggttaggttaaaggtctttgtactaggaggctgtaggcataaattggtgtgttcaccagcaccatgcaactttttcacctctgcctaatcatctcatgttcatgtcctactgttcaagcctccaagctgtgccttgggtggctttggggcatggacattgacccgtataaagaatttggagcttctgtggagttactctcttttttgccttctgacttctttccgtcggtgcgagatctcctcgacaccgcctctgctttgtatcgggaggccttagagtctccggaacattgttcacctcaccatacggcactcaggcaagctattctgtgttggggtgagttaatgaatctagccacctgggtgggaagtaatttggaagatccggcatccagggaattagtagtcagctatgtcaacgttaatatgggcctaaaaatcagacaactattgtggtttcacatttcctgtcttacttttgggagagaaactgttcttgaatatttggtgtcttttggagtgtggattcgcactcctcctgcatatagaccaccaaatgcccctatcttatcaacacttccggaaactactgttgttagacgaagaggcaggtcccctagaagaagaactccctcgcctcgcagacgaaggtctcaatcgccgcgtcgcagaagatctcaatctcgggaatctcaatgttagtattccttggacacataaggtgggaaactttacggggctttattcttctacggtaccttgctttaatcctaaatggcaaactccttcttttcctgacattcatttgcaggaggacattgttgatagatgtaagcaatttgtggggccccttacagtaaatgaaaacaggagactaaaattaattatgcccgctaggttttatcccaatgttactaaatatttgcccttagataaagggatcaaaccgtattatccagagtatgtagttaatcattacttccagacgcgacattatttacacactctttggaaggcggggatcttatataaaagagagtccacacgtagcgcctcattttgcgggtcaccatattcttgggaacaagatctacagcatgggaggttggtcttccaaacctcgaaaaggcatggggacaaatctttctgtccccaatcctctgggattcttccccgatcatcagttggaccctgcattcaaagccaactcagaaaatccagattgggacctcaacccgaacaaggacaactggccggacgccaacaaggtgggagtgggagcattcgggccagggttcacccctccccatgggggactgttggggtggagccctcaggctcagggcctactcacaactgtgccagcagctcctcctcctgcctccaccaatcggcagtcaggaaggcagcctactcccttatccccacctctaagggacactcatcctcaggccatgcagtggaa

SEQ ID NO: 669 - DNA, 3215 bp, Hepatitis B virus
  source 1..3215: mol_type = genomic DNA
ctccaccacattccaccaagctctgctagatcccagagtgaggggcctatattttcctgctggtggctccagttccggaacagtaaaccctgttccgactactgcctcacccatatcgtcaatcttctcgaggactggggaccctgcacagaacatggagaacacaacatcaggattcctaggacccctgctcgtgttacaggcggggtttttcttgttgacaaaaatcctcacaataccacagagtctagactcgtggtggacttctctcaattttctagggggagcacccacgtgtcctggccaaaattcgcagtccccaacctccaatcactcaccaacctcttgtcctccaatttgtcctggctatcgctggatgtgtctgcggcgttttatcatattcctcttcatcctgctgctatgcctcatcttcttgttggttcttctggactaccaaggtatgttgcccgtttgtcctctacttccaggaacaacaactaccagcacgggaccatgcaagacctgcacgattcctgctcaaggaacctctatgtttccctcttgttgctgtacaaaaccttcggacggaaactgcacttgtattcccatcccatcatcctgggctttcgcaagattcctatgggagtgggcctcagtccgtttctcctggctcagtttactagtgccatttgttcagtggttcgtagggctttcccccactgtttggctttcagttatatggatgatgtggtattgggggccaagtctgtacaacatcttgagtccctttttacctctattaccaattttcttttgtctttgggtatacatttgaatcctaataaaaccaaacgttggggctactcccttaacttcatgggatatgtaattggaagttggggtactttaccacaggaacatattgtacggaaactcaagcaatgttttcgaaaactgcctgtaaatagacctattgattggaaagtatgtcaaagaattgtgggtcttttgggctttgctgccccttttacacaatgtggctatcctgccttgatgcctttatatgcatgtatacactctaagcaggctttcactttctcgccaacttacaaggcctttctgtgtaaacaatatctgcacctttaccccgttgcccggcaacggtcaggtctctgccaagtgtttgctgacgcaacccccactggatggggcttggccataggccatcggcgcatgcgcggaacctttgtggctcctctgccgatccatactgcggaactcctagcagcttgttttgctcgcagccggtctggagcaaaacttatcgggactgacaactctgttgtcctctctcggaaatacacctccttcccatggctgctcgggtgtgctgccaactggatccttcgcgggacgtcctttgtctacgtcccgtcggcgctgaatcccgcggacgacccgtctcggggccgtttggggctctatcgtccccttcttcatctgccgttccggccgaccacggggcgcacctctctttacgcggtctccccgtctgtgccttctcatctgccggaccgtgtgcacttcgcttcacctctgcacgtcgcatggagaccaccgtgaacgcccaccaggtcttgcccaaggtcttacataagaggactcttggactctcatcaatgtcaacgaccgaccttgaggcatacttcaaagactgtttgtttaaggactgggaggagttgggggaggagattaggttaaaggtctttgtactaggaggctgtaggcataaattggtctgttcaccagcaccatgcaactttttcacctctgcctaatcatctcatgttcatgtcctactgttcaagcctccaagctgtgccttgggtggctttggggcatggacattgacccgtataaagaatttggagcttctgtggagttactctcttttttgccttctgacttctttccttctattcgagatctcctcgacaccgcctctgctctgtatcgggaggccttagagtctccggaacattgttcacctcaccatacagcactcaggcaagctattctgtgttggggtgagttgatgaatctggccacctgggtgggaagtaatttggaagacccagcatccagggaattagtagtcagctatgtcaatgttaatatgggcctaaaaatcagacaactattgtggtttcacatttcctgtcttacttttggaagagaaactgttcttgagtatttggtatcttttggagtgtggattcgcactcctccagcttacagaccaccaaatgcccctatcttatcaacacttccggaaactactgttgttagacgacgaggcaggtcccctagaagaagaactccctcgcctcgcagacgaaggtctcaatcgccgcgtcgcagaagatctcaatctcgggaatctcaatgttagtatcccttggactcataaggtgggaaactttactgggctttattcttctactgtacctgtctttaatcctgagtggcaaactccctcctttcctaacattcatttacaggaggacattattaatagatgtgaacaatatgtgggccctcttacaactaatgaaaaaaggagattaaaattaattatgcctgctaggttttatcctaaccttaccaaatacttgcccttggataaaggcattaaaccttattatcctgaacatgcagttaatcattacttcaaaactaggcattatttacatactctgtggaaggccggcattctatataagagagaaactacacgcagcgcttcattttgtgggtcaccatattcttgggaacaagagctacagcatgggaggttggtcttccaaacctcgacaaggcatggggacgaatctttctgttcccaatcctctgggattttttcccgatcaccagttggaccctgcgttcggagccaactcaaacaatccagattgggacttcaaccccaacaaggatcactggccagaggcaaatcaggtaggagcgggagcattcgggccagggttcaccccaccacacggcggtcttttggggtggagccctcaggctcagggcatattgaccacagtgccagcagcgcctcctcctgcctccaccaatcggcagtcaggaagacagcctactcccatctctccacctctaagagacagtcatcctcaggccatgcagtggaa

SEQ ID NO: 670 - DNA, 10123 bp, synthetic construct
  source 1..10123: mol_type = other DNA
aaaaacctcccacacctccccctgaacctgaaacataaaatgaatgcaattgttgttgttaacttgtttattgcagcttataatggttacaaataaagcaatagcatcacaaatttcacaaataaagcatttttttcactgcattctagttgtggtttgtccaaactcatcaatgtatcttatcatgtctggatctgggccactccctctctgcgcgctcgctcgctcactgaggccgcccgggctttgcccgggcggcctcagtgagcgagcgagcgcgcagagagggagtggccaactccatcactaggggttcctctgctcgatgtattcaatctaagcaggctttcactttctcgccaacttacaaggcctttctgtgtaaacaatacctgaacctttaccccgttgcccggcaacggccaggtctgtgccaagtgtttgctgacgcaacccccactggctggggcttggtcatgggccatcagcgcgtgcgtggaaccttttcggctcctctgccgatccatactgcggaactcctagccgcttgttttgctcgcagcaggtctggagcaaacattatcgggactgataactctgttgtcctctcccgcaaatatacatcgtatccatggctgctaggctgtgctgccaactggatcctgcgcgggacgtcctttgtttacgtcccgtcggcgctgaatcctgcggacgacccttctcggggtcgcttgggactctctcgtccccttctccgtctgccgttccgaccgaccacggggcgcacctctctttacgcggactccccgtctgtgccttctcatctgccggaccgtgtgcacttcgcttcacctctgcacgtcgcatggagaccaccgtgaacgcccaccgaatgttgcccaaggtcttacataagaggactcttggactctctgcaatgtcaacgaccgaccttgaggcatacttcaaagactgtttgtttaaagactgggaggagttgggggaggagattagattaaaggtctttgtactaggaggctgtaggcataaattggtctgcgcaccagcaccatgcaactttttcacctctgcctaatcatctcttgttcatgtcctactgttcaagcctccaagctgtgccttgggtggctttggggcatggacatcgacccttataaagaatttggagctactgtggagttactctcgtttttgccttctgacttctttccttcagtacgagatcttctagataccgcctcagctctgtatcgggaagccttagagtctcctgagcattgttcacctcaccatactgcactcaggcaagcaattctttgctggggggaactaatgactctagctacctgggtgggtgttaatttggaagatccagcatctagagacctagtagtcagttatgtcaacactaatatgggcctaaagttcaggcaactcttgtggtttcacatttcttgtctcacttttggaagagaaaccgttatagagtatttggtgtctttcggagtgtggattcgcactcctccagcttatagaccaccaaatgcccctatcctatcaacacttccggaaactactgttgttagacgacgaggcaggtcccctagaagaagaactccctcgcctcgcagacgaaggtctcaatcgccgcgtcgcagaagatctcaatctcgggaacctcaatgttagtattccttggactcataaggtggggaactttactggtctttattcttctactgtacctgtctttaatcctcattggaaaacaccatcttttcctaatatacatttacaccaagacattatcaaaaaatgtgaacagtttgtaggcccacttacagttaatgagaaaagaagattgcaattgattatgcctgctaggttttatccaaaggttaccaaatatttaccattggataagggtattaaaccttattatccagaacatctagttaatcattacttccaaactagacactatttacacactctatggaaggcgggtatattatataagagagaaacaacacatagcgcctcattttgtgggtcaccatattcttgggaacaagatctacagcatggggcagaatctttccaccagcaatcctctgggattctttcccgaccaccagttggatccagccttcagagcaaacacagcaaatccagattgggacttcaatcccaacaaggacacctggccagacgccaacaaggtaggagctggagcattcgggctgggtttcaccccaccgcacggaggccttttggggtggagccctcaggctcagggcatactacaaactttgccagcaaatccgcctcctgcctccaccaatcgccagacaggaaggcagcctaccccgctgtctccacctttgagaaacactcatcctcaggccatgcagtggaattccacaacctttcaccaaactctgcaagatcccagagtgagaggcctgtatttccctgctggtggctccagttcaggagcagtaaaccctgttccgactactgcctctcccttatcgtcaatcttctcgaggattggggaccctgcgctgaacatggagaacatcacatcaggattcctaggaccccttctcgtgttacaggcggggtttttcttgttgacaagaatcctcacaataccgcagagtctagactcgtggtggacttctctcaattttctagggggaactaccgtgtgtcttggccaaaattcgcagtccccaacctccaatcactcaccaacctcctgtcctccaacttgtcctggttatcgctggatgtgtctgcggcgttttatcatcttcctcttcatcctgctgctatgcctcatcttcttgttggttcttctggactatcaaggtatgttgcccgtttgtcctctaattccaggatcctcaaccaccagcacgggaccatgccgaacctgcatgactactgctcaaggaacctctatgtatccctcctgttgctgtaccaaaccttcggacggaaattgcacctgtattcccatcccatcatcctgggctttcggaaaattcctatgggagtgggcctcagcccgtttctcctggctcagtttactagtgccatttgttcagtggttcgtagggctttcccccactgtttggctttcagttatatggatgatgtggtattgggggccaagtctgtacagcatcttgagtccctttttaccgctgttaccaattttcttttgtctttgggtatacatttaaaccctaacaaaacaaagagatggggttactctctgaattttatgggttatgtcattggaagttatgggtccttgccacaagaacacatcatacaaaaaatcaaagaatgttttagaaaacttcctattaacaggcctattgattggaaagtatgtcaacgaattgtgggtcttttgggttttgctgccccatttacacaatgtggttatcctgcgttaatgcccttgtatgcatgtattcaatctaagcaggctttcactttctcgccaacttacaaggcctttctgtgtaaacaatacctgaacctttaccccgttgcccggcaacggccaggtctgtgccaagtgtttgctgacgcaacccccactggctggggcttggtcatgggccatcagcgcgtgcgtggaaccttttcggctcctctgccgatccatactgcggaactcctagccgcttgttttgctcgcagcaggtctggagcaaacattatcgggactgataactctgttgtcctctcccgcaaatatacatcgtatccatggctgctaggctgtgctgccaactggatcctgcgcgggacgtcctttgtttacgtcccgtcggcgctgaatcctgcggacgacccttctcggggtcgcttgggactctctcgtccccttctccgtctgccgttccgaccgaccacggggcgcacctctctttacgcggactccccgtctgtgccttctcatctgccggaccgtgtgcacttcgcttcacctctgcacgtcgcatggagaccaccgtgaacgcccaccgaatgttgcccaaggtcttacataagaggactcttggactctctgcaatgtcaacgaccgaccttgaggcatacttcaaagactgtttgtttaaagactgggaggagttgggggaggagattagattaaaggtctttgtactaggaggctgtaggcataaattggtctgcgcaccagcaccatgcaactttttcacctctgcctaatcatctcttgttcatgtcctactgttcaagcctccaagctgtgccttgggtggctttggggcatggacatcgacccttataaagaatttggagctactgtggagttactctcgtttttgccttctgacttctttccttcagtacgagatcccctaactacaaggaacccctagtgatggagttggccactccctctctgcgcgctcgctcgctcactgaggccgggcgaccaaaggtcgcccgacgcccgggctttgcccgggcggcctcagtgagcgagcgagcgcgcagagagggacagatccccaggaagctcctctgtgtcctcataaaccctaacctcctctacttgagaggacattccaatcataggctgcccatccaccctctgtgtcctcctgttaattaggtcacttaacaaaaaggaaattgggtaggggtttttcacagaccgctttctaagggtaattttaaaatatctgggaagtcccttccactgctgtgttccagaagtgttggtaaacagcccacaaatgtcaacagcagaaacatacaagctgtcagctttgcacaagggcccaacaccctgctcatcaagaagcactgtggttgctgtgttagtaatgtgcaaaacaggaggcacattttccccacctgtgtaggttccaaaatatctagtgttttcatttttacttggatcaggaacccagcactccactggataagcattatccttatccaaaacagccttgtggtcagtgttcatctgctgactgtcaactgtagcattttttggggttacagtttgagcaggatatttggtcctgtagtttgctaacacaccctgcagctccaaaggttccccaccaacagcaaaaaaatgaaaatttgacccttgaatgggttttccagcaccattttcatgagttttttgtgtccctgaatgcaagtttaacatagcagttaccccaataacctcagttttaacagtaacagcttcccacatcaaaatatttccacaggttaagtcctcatttaaattaggcaaaggaattaattcttgaagacgaaagggcctcgtgatacgcctatttttataggttaatgtcatgataataatggtttcttagacgtcaggtggcacttttcggggaaatgtgcgcggaacccctatttgtttatttttctaaatacattcaaatatgtatccgctcatgagacaataaccctgataaatgcttcaataatattgaaaaaggaagagtatgagtattcaacatttccgtgtcgcccttattcccttttttgcggcattttgccttcctgtttttgctcacccagaaacgctggtgaaagtaaaagatgctgaagatcagttgggtgcacgagtgggttacatcgaactggatctcaacagcggtaagatccttgagagttttcgccccgaagaacgttttccaatgatgagcacttttaaagttctgctatgtggcgcggtattatcccgtgttgacgccgggcaagagcaactcggtcgccgcatacactattctcagaatgacttggttgagtactcaccagtcacagaaaagcatcttacggatggcatgacagtaagagaattatgcagtgctgccataaccatgagtgataacactgcggccaacttacttctgacaacgatcggaggaccgaaggagctaaccgcttttttgcacaacatgggggatcatgtaactcgccttgatcgttgggaaccggagctgaatgaagccataccaaacgacgagcgtgacaccacgatgcctgcagcaatggcaacaacgttgcgcaaactattaactggcgaactacttactctagcttcccggcaacaattaatagactggatggaggcggataaagttgcaggaccacttctgcgctcggcccttccggctggctggtttattgctgataaatctggagccggtgagcgtgggtctcgcggtatcattgcagcactggggccagatggtaagccctcccgtatcgtagttatctacacgacggggagtcaggcaactatggatgaacgaaatagacagatcgctgagataggtgcctcactgattaagcattggtaactgtcagaccaagtttactcatatatactttagattgatttaaaacttcatttttaatttaaaaggatctaggtgaagatcctttttgataatctcatgaccaaaatcccttaacgtgagttttcgttccactgagcgtcagaccccgtagaaaagatcaaaggatcttcttgagatcctttttttctgcgcgtaatctgctgcttgcaaacaaaaaaaccaccgctaccagcggtggtttgtttgccggatcaagagctaccaactctttttccgaaggtaactggcttcagcagagcgcagataccaaatactgtccttctagtgtagccgtagttaggccaccacttcaagaactctgtagcaccgcctacatacctcgctctgctaatcctgttaccagtggctgctgccagtggcgataagtcgtgtcttaccgggttggactcaagacgatagttaccggataaggcgcagcggtcgggctgaacggggggttcgtgcacacagcccagcttggagcgaacgacctacaccgaactgagatacctacagcgtgagctatgagaaagcgccacgcttcccgaagggagaaaggcggacaggtatccggtaagcggcagggtcggaacaggagagcgcacgagggagcttccagggggaaacgcctggtatctttatagtcctgtcgggtttcgccacctctgacttgagcgtcgatttttgtgatgctcgtcaggggggcggagcctatggaaaaacgccagcaacgcggcctttttacggttcctggccttttgctggccttttgctcacatgttctttcctgcgttatcccctgattctgtggataaccgtattaccgcctttgagtgagctgataccgctcgccgcagccgaacgaccgagcgcagcgagtcagtgagcgaggaagcggaagagcgcctgatgcggtattttctccttacgcatctgtgcggtatttcacaccgcatatggtgcactctcagtacaatctgctctgatgccgcatagttaagccagtatacactccgctatcgctacgtgactgggtcatggctgcgccccgacacccgccaacacccgctgacgcgccctgacgggcttgtctgctcccggcatccgcttacagacaagctgtgaccgtctccgggagctgcatgtgtcagaggttttcaccgtcatcaccgaaacgcgcgaggcagctgtggaatgtgtgtcagttagggtgtggaaagtccccaggctccccagcaggcagaagtatgcaaagcatgcatctcaattagtcagcaaccaggtgtggaaagtccccaggctccccagcaggcagaagtatgcaaagcatgcatctcaattagtcagcaaccatagtcccgcccctaactccgcccatcccgcccctaactccgcccagttccgcccattctccgccccatggctgactaattttttttatttatgcagaggccgaggccgcctcggcctctgagctattccagaagtagtgaggaggcttttttggaggcctaggcttttgcaaaaagcttcacgctgccgcaagcactcagggcgcaagggctgctaaaggaagcggaacacgtagaaagccagtccgcagaaacggtgctgaccccggatgaatgtcagctactgggctatctggacaagggaaaacgcaagcgcaaagagaaagcaggtagcttgcagtgggcttacatggcgatagctagactgggcggttttatggacagcaagcgaaccggaattgccagctggggcgccctctggtaaggttgggaagccctgcaaagtaaactggatggctttcttgccgccaaggatctgatggcgcaggggatcaagatcgatctgatcaagagacaggatgaggatcgtttcgcatgattgaacaagatggattgcacgcaggttctccggccgcttgggtggagaggctattcggctatgactgggcacaacagacaatcggctgctctgatgccgccgtgttccggctgtcagcgcaggggcgcccggttctttttgtcaagaccgacctgtccggtgccctgaatgaactgcaggacgaggcagcgcggctatcgtggctggccacgacgggcgttccttgcgcagctgtgctcgacgttgtcactgaagcgggaagggactggctgctattgggcgaagtgccggggcaggatctcctgtcatctcaccttgctcctgccgagaaagtatccatcatggctgatgcaatgcggcggctgcatacgcttgatccggctacctgcccattcgaccaccaagcgaaacatcgcatcgagcgagcacgtactcggatggaagccggtcttgtcgatcaggatgatctggacgaagagcatcaggggctcgcgccagccgaactgttcgccaggctcaaggcgcgcatgcccgacggcgaggatctcgtcgtgacccatggcgatgcctgcttgccgaatatcatggtggaaaatggccgcttttctggattcatcgactgtggccggctgggtgtggcggaccgctatcaggacatagcgttggctacccgtgatattgctgaagagcttggcggcgaatgggctgaccgcttcctcgtgctttacggtatcgccgctcccgattcgcagcgcatcgccttctatcgccttcttgacgagttcttctgagcgggactctggggttcgaaatgaccgaccaagcgacgcccaacctgccatcacgagatttcgattccaccgccgccttctatgaaaggttgggcttcggaatcgttttccgggacgccggctggatgatcctccagcgcggggatctcatgctggagttcttcgcccaccccgggctcgatcccctcgcgagttggttcagctgctgcctgaggctggacgacctcgcggagttctaccggcagtgcaaatccgtcggcatccaggaaaccagcagcggctatccgcgcatccatgcccccgaactgcaggagtggggaggcacgatggccgctttggtccggatctttgtgaaggaaccttacttctgtggtgtgacataattggacaaactacctacagagatttaaagctctaaggtaaatataaaatttttaagtgtataatgtgttaaactactgattctaattgtttgtgtattttagattccaacctatggaactgatgaatgggagcagtggtggaatgcctttaatgaggaaaacctgttttgctcagaagaaatgccatctagtgatgatgaggctactgctgactctcaacattctactcctccaaaaaagaagagaaaggtagaagaccccaaggactttccttcagaattgctaagttttttgagtcatgctgtgtttagtaatagaactcttgcttgctttgctatttacaccacaaaggaaaaagctgcactgctatacaagaaaattatggaaaaatattctgtaacctttataagtaggcataacagttataatcataacatactgttttttcttactccacacaggcatagagtgtctgctattaataactatgctcaaaaattgtgtacctttagctttttaatttgtaaaggggttaataaggaatatttgatgtatagtgccttgactagagatcataatcagccataccacatttgtagaggttttacttgcttta

SEQ ID NO: 671 - DNA, 3212 bp, Hepatitis B virus
  source 1..3212: mol_type = genomic DNA
ttccacaacattccaccaagctctgcaggatcccagagtaagaggcctgtattttcctgctggtggctccagttccggaacagtgaaccctgttccgactactgcctcactcatctcgtcaatcttctcgaggattggggaccctgcaccgaacatggaaagcatcacatcaggattcctaggacccctgctcgtgttacaggcggggtttttcttgttgacaaaaatcctcacaataccgcagagtctagactcgtggtggacttctctcaattttctagggggagctcccgtgtgtcttggccaaaattcgcagtccccaacctccaatcactcaccaacctcttgtcctccaatttgtcctggctatcgctggatgtgtctgcggcgttttatcatcttcctcttcatcctgctgctatgcctcatcttcttgttggttcttctggactatcaaggtatgttgcccgtttgtcctctaattccaggatcatcaaccaccagtacgggaccctgccgaacctgcacgactcttgctcaaggaacctctatgtttccctcatgttgctgttcaaaaccttcggacggaaattgcacttgtattcccatcccatcatcatgggctttcggaaaattcctatgggagtgggcctcagcccgtttctcctggctcagtttactagtgccatttgttcagtggttcgccgggctttcccccactgtctggctttcagttatatggatgatgtggtattgggggccaagtctgtacaacatcttgagtccctttatacctctgttaccaattttcttttgtctttgggtatacatttaaatcccaacaaaacaaaaagatggggatattccctaaatttcatgggttatgtaattggaagttgggggtcattaccacaggaacacatcagaatgaaaatcaaagactgttttagaaaactccctgttaaccggcctattgattggaaagtatgtcaaagaattgtgggtcttttgggctttgctgccccttttacacaatgtggatatcctgctttaatgcctctgtatgcgtgtattcaatctaagcaggctttcactttctcgccaacttacaaggcctttctgtgtaaacaatacctgaacctttaccccgttgcccggcaacggccaggtctgtgccaagtgtttgctgatgcaacccccactggctggggcttggccataggccatcagcgcatgcgtggaacctttgtggctcctctgccgatccatactgcggaactcctagccgcttgttttgctcgcagcaggtctggagcgaaacttatcgggacagataattctgtcgttctctcccggaaatatacatcatttccatggctgctaggctgtgctgccaactggatcctgcgagggacgtcctttgtctacgtcccgtcagcgctgaatcctgcggacgacccgtctcggggtcgcttggggatctatcgtccccttctccgtctgccgttccagccgaccacggggcgcacctctctttacgcggtctccccgtctgtgccttctcatctgccggaccgtgtgcacttcgcttcacctctgcacgtcgcatggagaccaccgtgaacgcccaccaaatcttgcccaaggtcttacataagaggactcttggactctctgcaatgtcaacgaccgaccttgaggcatacttcaaagactgtttgtttaaagactgggaggagttgggggaggagattagattaaaggtctttgtactaggaggctgtaggcataaattggtctgcgcaccagcaccatgcaactttttcacctctgcctaatcatctcttgttcatgtcctactgttcaagcctccaagctgtgccttgggtggctttggggcatggacattgacccttataaagaatttggagctactgtggagttactctcgtttttgccttctgacttctttccttcagtaagagatcttctagataccgcctcagctctgtatcgggatgccttagaatctcctgagcattgttcacctcaccacactgcactcaggcaagccattctttgctggggggaactaatgactctagctacctgggtgggtgtaaatttggaagatccagcatccagggacctagtagtcagttatgtcaatactaatatgggcctaaagttcaggcaattattgtggtttcacatttcttgtctcacttttggaagagaaaccgtcatagagtatttggtgtcttttggagtgtggattcgcactcctccagcttatagaccaccaaatgcccctatcttatcaacacttccggagaatactgttgttagacgaagaggcaggtcccctagaagaagaactccctcgcctcgcagacgaagatctcaatcgccgcgtcgcagaagatctcaatctccagcttcccaatgttagtattccttggactcacaaggtgggaaattttacggggctttactcttctactatacctgtctttaatcctaactggaaaactccatcttttcctgatattcatttgcaccaggacattattaacaaatgtgaacaatttgtaggtcctctaacagtaaatgaaaaacgaagattaaacttagtcatgcctgctagattttttcccatctctacgaaatatttgcccctagagaaaggtataaaaccttattatccagataatgtagttaatcattacttccaaaccagacactatttacataccctatggaaggcgggcatcttatataaaagagaaactacacgtagcgcctcattttgtgggtcaccttattcttgggaacaagagctacatcatggggctttcttggacggtccctctcgaatgggggaagaatcattccaccaccaatcctctgggattttttcccgaccaccagttggatccagcattcagagcaaacaccagaaatccagattgggaccacaatcccaacaaagaccactggacagaagccaacaaggtaggagtgggagcattcgggccggggttcactcccccacacggaggccttttggggtggagccctcaggctcaaggcatgctaaaaacattgccagcagatccgcctcctgcctccaccaatcggcagtcaggaaggcagcctaccccaatcactccacctttgagagacactcatcctcaggccatgcagtggaa

SEQ ID NO: 672 - DNA, 3215 bp, Hepatitis B virus
  source 1..3215: mol_type = genomic DNA
ctcaactcagttccaccaggctctgttggatccgagggtaagggctctgtattttcctgctggtggctccagttcagggacacagaaccctgctccgactattgcctctctcacatcatcaatcttctcgaagactgggggccctgccatgaacatggagaacatcacatcaggactcctaggacccctgctcgtgttacaggcggtgtgtttcttgttgacaaaaatcctcacaataccacagagtctagactcgtggtggacttctctcaattttctagggggactacccgggtgtcctggccaaaattcgcagtccccaacctccaatcacttaccaacctcctgtcctccaacttgtcctggctatcgttggatgtgtctgcggcgttttatcatcttcctcttcatcctgctgctatgcctcatcttcttgttggttcttctggactaccaaggtatgttgcccgtttgtcctctacttccaggatccacgaccaccagcacgggaccatgcaaaacctgcacaactcttgctcaaggaacctctatgtttccctcctgttgctgttccaaaccctcggacggaaactgcacctgtattcccatcccatcatcttgggctttaggaaaatacctatgggagtgggcctcagcccgtttctcctggctcagtttactagtgcaatttgttcagtggtgcgtagggctttcccccactgtctggcttttagttatatggatgatctggtattgggggccaaatctgtgcagcatcttgagtccctttataccgctgttaccaattttctgttatctgtgggtatccatttaaatactgctaaaacaaaaagatggggttactccctacatttcatgggttatgttattggtagttggggaacgttaccccaagatcatattgtacacaaaatcaaagattgttttcggaaacttcctgtaaatcgtccaattgattggaaagtttgtcaacgcattgtgggtcttttgggctttgcggcccctttcacccaatgtggttatcctgctctcatgcctttgtatacctgtattactgctaaacaggcgtttgtcttttcgccaacttacaaggcctttctctgtaaacaatacatgaacctttaccccgttgctcggcaacggccaggcctgtgccaagtgtttgctgacgcaacccccactggttggggcttggccattggccatcagcgcatgcgtggaacctttgtggctcctctgccgatccatactgcggaactccttgcagcctgtttcgctcgcagccggtctggagcgaacattatcggcacagacaactctgttgtcctctctaggaagtacacctcctttccatggctgctcggttgtgctgccaactggatcctgcgcgggacgtcctttgtttacgtcccgtcggcgctgaatcccgcggacgacccctcccggggtcgcttggggctgtaccgcccccttcttcgtctgccgttccagccgacaacgggtcgtacctctctttacgcggactccccgtctgttccttctcatctgccggaccgtgtgcacttcgcttcacctctgcacgtcgcatggagaccaccgtgaacgccccctggaatctgccaacagtcttacataagaggactcttggactttcaggacggtcaatgacctggatcgaagactacatcaaagactgtgtatttaaggactgggaggagctgggggaggagatcacgttaaaggtctttgtactaggaggctgtaggcataaattggtctgtgcaccagcaccatgcaactttttcacctctgcctaatcatcttttgttcatgtcccactgttcaagcctccaagctgtgccttgggtggctttggggcatggacattgacccttataaagaatttggagcttctgtggaattgctctcttttttgccttctgatttcttcccgtctgttcgggacctactcgacaccgcttcagccctgtaccgggatgctctagagtcaccggaacattgcacccccaatcataccgctctcaggcaagctattttgtgctggggtgagttaatgactttggcttcctgggtgggtaataatttggaagaccctgcagctagggatttagtagttaattatgtcaacactaatatgggcctaaaaattagacaactgttgtggtttcacatttcctgtcttacttttggaagagaaacagttcttgagtatttggtgtcctttggagtgtggattcgcactccacctgcttatagaccaccaaatgcccctatcctatccacacttccggaaactactgttgttagacgacgaggcaggtcccctagaagaagaactccctcgcctcgccgacgaaggtctcaatcgccgcgtcgcagaagatctcaatctccagcttcccaatgttagtattccttggactcataaggtgggaaattttacggggctctactcttctactgtacctgctttcaatcctaactggttaactccttcttttcctgatattcatttacatcaggatctgatatctaaatgtgaacaatttgtaggcccgctcactaaaaatgaattgagaagattaaaattggtcatgccagctagattttatcctaaggttaccaaatactttcctatggagaaagggattaaaccctattatcctgagcatgcagttaatcattattttaaaacaagacattatttgcatactttatggaaggcgggaatcttatataagagagaatccacacgtagcgcctcattttgtgggtcaccatattcctgggaacaagagctacagcatgggagcacctctctcaacgacaagaaggggcatgggactgaatctttctgtgcccaatcctctgggcttcttgccagaccatcagctggatccgctattcagagcaaattccagcagtcccgactgggacttcaacacaaacaaggacagttggccaatggcaaacaaggtaggagtgggaggctacggtccagggttcacacccccacacggtggcctgctggggtggagccctcaggcacagggtgttttaacaaccttgccagcagatccgcctcctgcttccaccaatcggcggtccgggagaaagccaaccccagtctctccacctctaagagacacacatccacaggccatgcagtggaa

SEQ ID NO: 673 - DNA, 3248 bp, Hepatitis B virus
  source 1..3248: mol_type = genomic DNA
ctctacagcattccaccaagctctacaaaatcccaaagtcaggggcctgtattttcctgctggtggctccagttcagggatagtgaaccctgttccgactattgcctctcacatctcgtcaatcttctccaggattggggaccctgcaccgaacatggagaacatcacatcaggattcctaggacccctgctcgtgttacaggcggggtttttcttgttgacaagaatcctcacaataccgcagagtctagactcgtggtggacttctctcaattttctagggggagtgcccgtgtgtcctggcctaaattcgcagtccccaacctccaatcactcaccaatctcctgtcctccaacttgtcctggctatcgctggatgtgtctgcggcgttttatcatattcctcttcatcctgctgctatgcctcatcttcttgttggttcttctggactatcaaggtatgttgcccgtttgtcctctgattccaggatcctcgaccaccagtacgggaccctgcaaaacctgcacgactcctgctcaaggcaactctatgtatccctcatgttgctgtacaaaaccttcggacggaaattgcacctgtattcccatcccatcatcttgggctttcgcaaaatacctatgggagtgggcctcagtccgtttctcttggctcagtttactagtgccatttgttcagtggttcgtagggctttcccccactgtctggctttcagctatatggatgatgtggtattgggggccaaatctgtacaacatcttgagtccctttataccgctgttaccaattttcttttgtctttgggtatacatctaaaccctaacaaaacaaaaagatggggttattccttaaattttatgggatatgtaattggaagttggggtactttgccacaagaacacatcacacagaaaattaagcaatgttttcggaaactccctgttaacaggccaattgattggaaagtctgtcaacgaataactggtctgttgggtttcgctgctccttttacccaatgtggttaccctgccttaatgcctttatatgcatgtatacaagctaagcaggcttttactttctcgccaacttataaggcctttctctgtaaacaatacatgaacctttaccccgttgctaggcaacggcccggtctgtgccaagtgtttgctgacgcaacccccactggttggggcttggccatcggccatcagcgcatgcgtggaacctttgtggctcctctgccgatccatactgcggaactcctagctgcttgttttgctcgcagccggtctggagcaaaactcattgggactgacaattctgtcgtcctttctcggaaatatacatcctttccatggctgctaggctgtgctgccaactggatccttcgcgggacgtcctttgtttacgtcccgtcagcgctgaatccagcggacgacccctcccggggccgtttggggctctgtcgcccccttctccgtctgccgttcctgccgaccacggggcgcacctctctttacgcggtctccccgtctgttccttctcatctgccggaccgtgtgcacttcgcttcacctctgcacgttacatggaaaccgccatgaacacctctcatcatctgccaaggcagttatataagaggactcttggactgtttgttatgtcaacaaccggggtggagaaatacttcaaggactgtgtttttgctgagtgggaagaattaggcaatgagtccaggttaatgacctttgtattaggaggctgtaggcataaattggtctgcgcaccagcaccatgtaactttttcacctctgcctaatcatctcttgttcatgtcctactgttcaagcctccaagctgtgccttgggtggctttagggcatggatagaacaactttgccatatggcctttttggcttagacattgacccttataaagaatttggagctactgtggagttgctctcgtttttgccttctgactttttcccgtctgttcgtgatcttctcgacaccgcttcagctttgtaccgggaatccttagagtcctctgatcattgttcgcctcaccatacagcactcaggcaagcaatcctgtgctggggtgagttgatgactctagctacctgggtgggtaataatttggaagatccagcatccagagatttggtggtcaattatgttaatactaatatgggtttaaaaatcaggcaactattgtggtttcacatttcctgtcttacttttgggagagaaaccgttcttgagtatttggtgtcttttggagtgtggattcgcactcctcctgcttatagaccaccaaatgcccctatcctatcaacacttccggagactactgttgttagacgaagaggcaggtcccctcgaagaagaactccctcgcctcgcagacgaagatctcaatcgccgcgtcgcagaagatctgcatctccagcttcccaatgttagtattccttggactcacaaggtgggaaactttacggggctgtattcttctactatacctgtctttaatcctgattggcaaactccttcttttccaaatatccatttgcatcaagacattataactaaatgtgaacaatttgtgggccctctcacagtaaatgagaaacgaagattaaaactagttatgcctgccagatttttcccaaactctactaaatatttaccattagacaaaggtatcaaaccgtattatccagaaaatgtagttaatcattacttccagaccagacattatttacataccctttggaaggcgggtattctatataagagagaaacatcccgtagcgcttcattttgtgggtcaccatatacttgggaacaagatctacagcatggggctttcttggacggtccctctcgagtggggaaagaacctttccaccagcaatcctctaggattccttcccgatcaccagttggacccagcattcagagcaaataccaacaatccagattgggacttcaatcccaaaaaggacccttggccagaggccaacaaggtaggagttggagcctatggacccgggttcacccctccacacggaggccttttggggtggagccctcagtctcagggcacactaacaactttgccagcagatccgcctcctgcctccaccaatcgtcagtcagggaggcagcctactcccatctctccaccactaagagacagtcatcctcaggccatgcagtggaa

SEQ ID NO: 674 - DNA, 3215 bp, Hepatitis B virus
  source 1..3215: mol_type = genomic DNA
ctcaacacagttccaccaagcactgttggatccgagagtaaggggtctgtattttcctgctggtggctccagttcagaaacacagaaccctgctccgactattgcctctctcacatcatcaatcttctcgaagactggggaccctgctatgaacatggagaacatcacatcaggactcctaggaccccttctcgtgttacaggcggtgtgtttcttgttgacaaaaatcctcacaataccacagagtctagactcgtggtggacttctctcaattttctaggggtaccacccgggtgtcctggccaaaattcgcagtccccaatctccaatcacttaccaacctcctgtcctccaacttgtcctggctatcgttggatgtgtctgcggcgttttatcatcttcctcttcatcctgctgctatgcctcatcttcttgttggttcttctggactatcaaggtatgttgcccgtgtgtcctctacttccaggatctacaaccaccagcacgggaccctgcaaaacctgcaccactcttgctcaaggaacctctatgtttccctcctgctgctgtaccaaaccttcggacggaaattgcacctgtattcccatcccatcatcttgggctttcggaaaatacctatgggagtgggcctcagcccgtttctcttggctcagtttactagtgcaatttgttcagtggtgcgtagggctttcccccactgtctggcttttagttatatggatgatttggtattgggggccaaatctgtgcagcatcttgagtccctttataccgctgttaccaattttttgttatctgtgggcatccatttgaacacagctaaaacaaaatggtggggttattccttacactttatgggttatataattgggagttgggggaccttgcctcaggaacatattgtgcataaaatcaaagattgctttcgcaaacttcccgtgaatagacccattgattggaaggtttgtcaacgcattgtgggtcttttgggctttgcagccccttttactcaatgtggttatcctgctctcatgcccttgtatgcctgtattaccgctaagcaggcttttgttttctcgccaacttacaaggcctttctctgtaaacaatacatgaacctttaccccgttgctcggcaacggccaggcctttgccaagtgtttgctgacgcaacccccactggctggggcttggcgattggccatcagcgcatgcgcggaacctttgtggctcctctgccgatccatactgcggaactcctagcagcttgtttcgctcgcagcaggtctggagcggacattatcggcactgacaactccgttgtcctttctcggaagtacacctccttcccatggctgctaggctgtgctgccaactggatcctgcgcgggacgtcctttgtctacgtcccgtcggcgctgaatcctgcggacgacccctctcgtggtcgcttggggctctgccgccctcttctccgcctgccgttccggccgacgacgggtcgcacctctctttacgcggactccccgcctgtgccttctcatctgccggcccgtgtgcacttcgcttcacctctgcacgtcgcatggagaccaccgtgaacgccccttggaacttgccaacaaccttacataagaggactcttggactttcgccccggtcaacgacctggattgaggaatacatcaaagactgtgtatttaaggactgggaggagtcgggggaggagttgaggttaaaggtctttgtattaggaggctgtaggcataaattggtctgttcaccagcaccatgcaactttttcacctctgcctaatcatcttttgttcatgtcccactgttcaagcctccaagctgtgccttgggtggctttggggcatggacattgacccttataaagaatttggagcttctgtggagttactctcatttttgccttctgacttcttcccgtctgtccgggacctactcgacaccgcttcagccctctaccgagatgccttagaatcacccgaacattgcacccccaaccacactgctctcaggcaagctattttgtgctggggtgagttgatgaccttggcttcctgggtgggcaataatttagaggatcctgcagcaagagatctagtagttaattatgtcaatactaacatgggcctaaaaattagacaattattatggtttcacatttcctgccttacatttggaagagaaactgtgcttgagtatttggtgtcttttggagtgtggattcgcactccacctgcttatagaccaccaaatgcccctatcctatcaacacttccggagactactgttgttagacaacgaggcagggcccctagaagaagaactccctcgcctcgcagacgaagatctcaatcaccgcgtcgcagaagatctcaatctccagcttcccaatgttagtattccttggactcataaggtgggaaactttaccggtctttactcctctactatacctgttttcaatcctgactggttaactccttcttttcctgacattcacttgcatcaagatctgatacaaaaatgtgaacaatttgtaggcccactcactacaaatgaaaggagacgattgaaactaattatgccagctaggttttatcccaaagttactaaatacttccctttggataaaggtattaagccttactatccagagaatgtggttaatcattactttaaaactagacattatttacatactttgtggaaggcaggaattctatataagagagaatccacacatagcgcctcattttgtgggtcaccatattcctgggaacaagagctacagcatgggagcacctctctcaacggcgagaaggggcatgggacagaatctttctgtgcccaatcctctgggattctttccagaccaccagttggatccactattcagagcaaattccagcagtcccgattgggacttcaacacaaacaaggacaattggccaatggcaaacaaggtaggagtgggaggcttcggtccagggttcacacccccacacggtggccttctggggtggagccctcaggcacagggcattctgacaacctcgccaccagatccacctcctgcttccaccaatcggaggtcaggaagaaagccaaccccagtctctccacctctaagggacacacatccacaggccatgcagtggaa

SEQ ID NO: 675 - DNA, 20 bp, Hepatitis B virus
  source 1..20: mol_type = genomic DNA
tttgtttacgtcccgtcggc

SEQ ID NO: 676 - DNA, 30 bp, Hepatitis B virus
  source 1..30: mol_type = genomic DNA
tttacgtcccgtcggcgctgaatcctgcgg

SEQ ID NO: 677 - DNA, 20 bp, Hepatitis B virus
  source 1..20: mol_type = genomic DNA
tttacgtcccgtcggcgctg

SEQ ID NO: 678 - DNA, 20 bp, Hepatitis B virus
  source 1..20: mol_type = genomic DNA
tttacgcggactccccgtct

SEQ ID NO: 679 - DNA, 20 bp, Hepatitis B virus
  source 1..20: mol_type = genomic DNA
ttgtttacgtcccgtcggcg

SEQ ID NO: 680 - DNA, 20 bp, Hepatitis B virus
  source 1..20: mol_type = genomic DNA
ttgttgacaagaatcctcac

SEQ ID NO: 681 - DNA, 19 bp, Hepatitis B virus
  source 1..19: mol_type = genomic DNA
ttgagagaagtccaccacg

SEQ ID NO: 682 - DNA, 30 bp, Hepatitis B virus
  source 1..30: mol_type = genomic DNA
ttctcctggctcagtttactagtgccattt

SEQ ID NO: 683 - DNA, 20 bp, Hepatitis B virus
  source 1..20: mol_type = genomic DNA
ttctcctggctcagtttact

SEQ ID NO: 684 - DNA, 20 bp, Hepatitis B virus
  source 1..20: mol_type = genomic DNA
ttacgtcccgtcggcgctga

SEQ ID NO: 685 - DNA, 20 bp, Hepatitis B virus
  source 1..20: mol_type = genomic DNA
tgtttacgtcccgtcggcgc

SEQ ID NO: 686 - DNA, 20 bp, Hepatitis B virus
  source 1..20: mol_type = genomic DNA
tgtgccttctcatctgccgg

SEQ ID NO: 687 - DNA, 20 bp, Hepatitis B virus
  source 1..20: mol_type = genomic DNA
tgtgcacttcgcttcacctc

SEQ ID NO: 688 - DNA, 20 bp, Hepatitis B virus
  source 1..20: mol_type = genomic DNA
tggtggacttctctcaattt

SEQ ID NO: 689 - DNA, 20 bp, Hepatitis B virus
  source 1..20: mol_type = genomic DNA
tggctcagtttactagtgcc

SEQ ID NO: 690 - DNA, 25 bp, Hepatitis B virus
  source 1..25: mol_type = genomic DNA
tggacttctctcaattttctagggg

SEQ ID NO: 691 - DNA, 20 bp, Hepatitis B virus
  source 1..20: mol_type = genomic DNA
tggacttctctcaattttct

SEQ ID NO: 692 - DNA, 20 bp, Hepatitis B virus
  source 1..20: mol_type = genomic DNA
tgccttctcatctgccggac

SEQ ID NO: 693 - DNA, 20 bp, Hepatitis B virus
  source 1..20: mol_type = genomic DNA
tgccggaccgtgtgcacttc

SEQ ID NO: 694 - DNA, 20 bp, Hepatitis B virus
  source 1..20: mol_type = genomic DNA
tgccgatccatactgcggaa

SEQ ID NO: 695 - DNA, 20 bp, Hepatitis B virus
  source 1..20: mol_type = genomic DNA
tgcacttcgcttcacctctg

SEQ ID NO: 696 - DNA, 20 bp, Hepatitis B virus
  source 1..20: mol_type = genomic DNA
tgacaagaatcctcacaata

SEQ ID NO: 697 - DNA, 20 bp, Hepatitis B virus
  source 1..20: mol_type = genomic DNA
tctttacgcggactccccgt

SEQ ID NO: 698 - DNA, 20 bp, Hepatitis B virus
  source 1..20: mol_type = genomic DNA
tcttgttgacaagaatcctc

SEQ ID NO: 699 - DNA, 20 bp, Hepatitis B virus
  source 1..20: mol_type = genomic DNA
tctgtgccttctcatctgcc

SEQ ID NO: 700 - DNA, 20 bp, Hepatitis B virus
  source 1..20: mol_type = genomic DNA
tctgccgatccatactgcgg

SEQ ID NO: 701 - DNA, 20 bp, Hepatitis B virus
  source 1..20: mol_type = genomic DNA
tctctttacgcggactcccc

SEQ ID NO: 702 - DNA, 20 bp, Hepatitis B virus
  source 1..20: mol_type = genomic DNA
tctcatctgccggaccgtgt

SEQ ID NO: 703 - DNA, 20 bp, Hepatitis B virus
  source 1..20: mol_type = genomic DNA
tcggcgctgaatcctgcgga

SEQ ID NO: 704 - DNA, 20 bp, Hepatitis B virus
  source 1..20: mol_type = genomic DNA
tcctggctcagtttactagt

SEQ ID NO: 705 - DNA, 20 bp, Hepatitis B virus
  source 1..20: mol_type = genomic DNA
tcctcacaataccgcagagt

SEQ ID NO: 706 - DNA, 20 bp, Hepatitis B virus
  source 1..20: mol_type = genomic DNA
tcccgtcggcgctgaatcct

SEQ ID NO: 707 - DNA, 20 bp, Hepatitis B virus
  source 1..20: mol_type = genomic DNA
tccatactgcggaactccta

SEQ ID NO: 708 - DNA, 20 bp, Hepatitis B virus
  source 1..20: mol_type = genomic DNA
tcatctgccggaccgtgtgc

SEQ ID NO: 709 - DNA, 22 bp, Hepatitis B virus
  source 1..22: mol_type = genomic DNA
tcatctcgaacgttcacagtca

SEQ ID NO: 710 - DNA, 20 bp, Hepatitis B virus
  source 1..20: mol_type = genomic DNA
tcagtttactagtgccattt

SEQ ID NO: 711 - DNA, 20 bp, Hepatitis B virus
  source 1..20: mol_type = genomic DNA
tattgtgaggattcttgtca

SEQ ID NO: 712 - DNA, 30 bp, Hepatitis B virus
  source 1..30: mol_type = genomic DNA
taggaggctgtaggcataaattggtctgcg

SEQ ID NO: 713 - DNA, 20 bp, Hepatitis B virus
  source 1..20: mol_type = genomic DNA
tacgtcccgtcggcgctgaa

SEQ ID NO: 714 - DNA, 20 bp, Hepatitis B virus
  source 1..20: mol_type = genomic DNA
tacgcggactccccgtctgt

SEQ ID NO: 715 - DNA, 20 bp, Hepatitis B virus
  source 1..20: mol_type = genomic DNA
gtttacgtcccgtcggcgct

SEQ ID NO: 716 - DNA, 20 bp, Hepatitis B virus
  source 1..20: mol_type = genomic DNA
gttggtgcacttcgcttcac

SEQ ID NO: 717 - DNA, 20 bp, Hepatitis B virus
  source 1..20: mol_type = genomic DNA
gttgacaagaatcctcacaa

SEQ ID NO: 718 - DNA, 19 bp, Hepatitis B virus
  source 1..19: mol_type = genomic DNA
gttcccagtatggatcggc

SEQ ID NO: 719 - DNA, 20 bp, Hepatitis B virus
  source 1..20: mol_type = genomic DNA
gtgtgcacttcgcttcacct

SEQ ID NO: 720 - DNA, 20 bp, Hepatitis B virus
  source 1..20: mol_type = genomic DNA
gtggtggacttctctcaatt

SEQ ID NO: 721 - DNA, 21 bp, Hepatitis B virus
  source 1..21: mol_type = genomic DNA
gtggacttctctcaattttct

SEQ ID NO: 722 - DNA, 20 bp, Hepatitis B virus
  source 1..20: mol_type = genomic DNA
gtggacttctctcaattttc

SEQ ID NO: 723 - DNA, 20 bp, Hepatitis B virus
  source 1..20: mol_type = genomic DNA
gtgccttctcatctgccgga

SEQ ID NO: 724 - DNA, 20 bp, Hepatitis B virus
  source 1..20: mol_type = genomic DNA
gtgcacttcgcttcacctct

SEQ ID NO: 725 - DNA, 20 bp, Hepatitis B virus
  source 1..20: mol_type = genomic DNA
gtgaagcgaagtgcacacgg

SEQ ID NO: 726 - DNA, 20 bp, Hepatitis B virus
  source 1..20: mol_type = genomic DNA
gtctgtgccttctcatctgc

SEQ ID NO: 727 - DNA, 20 bp, Hepatitis B virus
  source 1..20: mol_type = genomic DNA
gtcggcgctgaatcctgcgg

SEQ ID NO: 728 - DNA, 20 bp, Hepatitis B virus
  source 1..20: mol_type = genomic DNA
gtcccgtcggcgctgaatcc

SEQ ID NO: 729 - DNA, 20 bp, Hepatitis B virus
  source 1..20: mol_type = genomic DNA
gtattgtgaggattcttgtc

SEQ ID NO: 730 - DNA, 20 bp, Hepatitis B virus
  source 1..20: mol_type = genomic DNA
ggtggacttctctcaatttt

SEQ ID NO: 731 - DNA, 20 bp, Hepatitis B virus
  source 1..20: mol_type = genomic DNA
gggcgcacctctctttacgc

SEQ ID NO: 732 - DNA, 20 bp, Hepatitis B virus
  source 1..20: mol_type = genomic DNA
ggctgtaggcataaattggt

SEQ ID NO: 733 - DNA, 20 bp, Hepatitis B virus
  source 1..20: mol_type = genomic DNA
ggcgctgaatcctgcggacg

SEQ ID NO: 734 - DNA, 20 bp, Hepatitis B virus
  source 1..20: mol_type = genomic DNA
ggaggaaccttcagggaagg

SEQ ID NO: 735 - DNA, 20 bp, Hepatitis B virus
  source 1..20: mol_type = genomic DNA
ggactccccgtctgtgcctt

SEQ ID NO: 736 - DNA, 20 bp, Hepatitis B virus
  source 1..20: mol_type = genomic DNA
ggaccgtgtgcacttcgctt

SEQ ID NO: 737 - DNA, 19 bp, Hepatitis B virus
  source 1..19: mol_type = genomic DNA
gctgtaggcataaattggt

SEQ ID NO: 738 - DNA, 20 bp, Hepatitis B virus
  source 1..20: mol_type = genomic DNA
gctgaatcctgcggacgacc

SEQ ID NO: 739 - DNA, 20 bp, Hepatitis B virus
  source 1..20: mol_type = genomic DNA
gctcagtttactagtgccat

SEQ ID NO: 740 - DNA, 20 bp, Hepatitis B virus
  source 1..20: mol_type = genomic DNA
gcggactccccgtctgtgcc

SEQ ID NO: 741 - DNA, 20 bp, Hepatitis B virus
  source 1..20: mol_type = genomic DNA
gcgctgaatcctgcggacga

SEQ ID NO: 742 - DNA, 20 bp, Hepatitis B virus
  source 1..20: mol_type = genomic DNA
gcgcacctctctttacgcgg

SEQ ID NO: 743 - DNA, 20 bp, Hepatitis B virus
  source 1..20: mol_type = genomic DNA
gccttctcatctgccggacc

SEQ ID NO: 744 - DNA, 20 bp, Hepatitis B virus
  source 1..20: mol_type = genomic DNA
gccggaccgtgtgcacttcg

SEQ ID NO: 745 - DNA, 20 bp, Hepatitis B virus
  source 1..20: mol_type = genomic DNA
gccgatccatactgcggaac

SEQ ID NO: 746 - DNA, 19 bp, Hepatitis B virus
  source 1..19: mol_type = genomic DNA
gccgatccatactgcggaa

SEQ ID NO: 747 - DNA, 20 bp, Hepatitis B virus
  source 1..20: mol_type = genomic DNA
gcacttcgcttcacctctgc

SEQ ID NO: 748 - DNA, 20 bp, Hepatitis B virus
  source 1..20: mol_type = genomic DNA
gcactagtaaactgagccag

SEQ ID NO: 749 - DNA, 20 bp, Hepatitis B virus
  source 1..20: mol_type = genomic DNA
gcacctctctttacgcggac

SEQ ID NO: 750 - DNA, 20 bp, Hepatitis B virus
  source 1..20: mol_type = genomic DNA
gatccatactgcggaactcc

SEQ ID NO: 751 - DNA, 20 bp, Hepatitis B virus
  source 1..20: mol_type = genomic DNA
gactccccgtctgtgccttc

SEQ ID NO: 752 - DNA, 20 bp, Hepatitis B virus
  source 1..20: mol_type = genomic DNA
gaccgtgtgcacttcgcttc

SEQ ID NO: 753 - DNA, 20 bp, Hepatitis B virus
  source 1..20: mol_type = genomic DNA
gacaagaatcctcacaatac

SEQ ID NO: 754 - DNA, 20 bp, Hepatitis B virus
  source 1..20: mol_type = genomic DNA
gaatcctcacaataccgcag

SEQ ID NO: 755 - DNA, 20 bp, Hepatitis B virus
  source 1..20: mol_type = genomic DNA
gaaaattgagagaagtccac

SEQ ID NO: 756 - DNA, 20 bp, Hepatitis B virus
  source 1..20: mol_type = genomic DNA
ctttgtttacgtcccgtcgg

SEQ ID NO: 757 - DNA, 30 bp, Hepatitis B virus
  source 1..30: mol_type = genomic DNA
cttgttgacaagaatcctcacaataccgca

SEQ ID NO: 758 - DNA, 20 bp, Hepatitis B virus
  source 1..20: mol_type = genomic DNA
cttctcatctgccggaccgt

SEQ ID NO: 759 - DNA, 20 bp, Hepatitis B virus
  source 1..20: mol_type = genomic DNA
ctgtgccttctcatctgccg

SEQ ID NO: 760 - DNA, 20 bp, Hepatitis B virus
  source 1..20: mol_type = genomic DNA
ctggctcagtttactagtgc

SEQ ID NO: 761 - DNA, 19 bp, Hepatitis B virus
  source 1..19: mol_type = genomic DNA
ctggctcagtttactagtg

SEQ ID NO: 762 - DNA, 20 bp, Hepatitis B virus
  source 1..20: mol_type = genomic DNA
ctgccggaccgtgtgcactt

SEQ ID NO: 763 - DNA, 20 bp, Hepatitis B virus
  source 1..20: mol_type = genomic DNA
ctgccgatccatactgcgga

SEQ ID NO: 764 - DNA, 20 bp, Hepatitis B virus
  source 1..20: mol_type = genomic DNA
ctctgccgatccatactgcg

SEQ ID NO: 765 - DNA, 20 bp, Hepatitis B virus
  source 1..20: mol_type = genomic DNA
ctcctggctcagtttactag

SEQ ID NO: 766 - DNA, 20 bp, Hepatitis B virus
  source 1..20: mol_type = genomic DNA
ctccccgtctgtgccttctc

SEQ ID NO: 767 - DNA, 20 bp, Hepatitis B virus
  source 1..20: mol_type = genomic DNA
ctcacaataccgcagagtct

SEQ ID NO: 768 - DNA, 30 bp, Hepatitis B virus
  source 1..30: mol_type = genomic DNA
ctatcaaggtatgttgcccgtttgtcctct

SEQ ID NO: 769 - DNA, 20 bp, Hepatitis B virus
  source 1..20: mol_type = genomic DNA
cgtgtgcacttcgcttcacc

SEQ ID NO: 770 - DNA, 30 bp, Hepatitis B virus
  source 1..30: mol_type = genomic DNA
cgtggtggacttctctcaattttctagggg

SEQ ID NO: 771 - DNA, 25 bp, Hepatitis B virus
  source 1..25: mol_type = genomic DNA
cgtggtggacttctctcaattttct

SEQ ID NO: 772 - DNA, 20 bp, Hepatitis B virus
  source 1..20: mol_type = genomic DNA
cgtggtggacttctctcaat

SEQ ID NO: 773 - DNA, 20 bp, Hepatitis B virus
  source 1..20: mol_type = genomic DNA
cgtggtggacttctctcaat

SEQ ID NO: 774 - DNA, 20 bp, Hepatitis B virus
  source 1..20: mol_type = genomic DNA
cgtcggcgctgaatcctgcg

SEQ ID NO: 775 - DNA, 20 bp, Hepatitis B virus
  source 1..20: mol_type = genomic DNA
cgtcccgtcggcgctgaatc

SEQ ID NO: 776 - DNA, 20 bp, Hepatitis B virus
  source 1..20: mol_type = genomic DNA
cggggcgcacctctctttac

SEQ ID NO: 777 - DNA, 20 bp, Hepatitis B virus
  source 1..20: mol_type = genomic DNA
cggcgctgaatcctgcggac

SEQ ID NO: 778 - DNA, 20 bp, Hepatitis B virus
  source 1..20: mol_type = genomic DNA
cggactccccgtctgtgcct

SEQ ID NO: 779 - DNA, 20 bp, Hepatitis B virus
  source 1..20: mol_type = genomic DNA
cggaccgtgtgcacttcgct

SEQ ID NO: 780 - DNA, 20 bp, Hepatitis B virus
  source 1..20: mol_type = genomic DNA
cgctgaatcctgcggacgac

SEQ ID NO: 781 - DNA, 20 bp, Hepatitis B virus
  source 1..20: mol_type = genomic DNA
cgcggactccccgtctgtgc

SEQ ID NO: 782 - DNA, 20 bp, Hepatitis B virus
  source 1..20: mol_type = genomic DNA
cgcacctctctttacgcgga

SEQ ID NO: 783 - DNA, 20 bp, Hepatitis B virus
  source 1..20: mol_type = genomic DNA
cctttgtttacgtcccgtcg

SEQ ID NO: 784 - DNA, 20 bp, Hepatitis B virus
  source 1..20: mol_type = genomic DNA
ccttctcatctgccggaccg

SEQ ID NO: 785 - DNA, 20 bp, Hepatitis B virus
  source 1..20: mol_type = genomic DNA
ccttaggcactcctgcctct

SEQ ID NO: 786 - DNA, 20 bp, Hepatitis B virus
  source 1..20: mol_type = genomic DNA
cctggctcagtttactagtg

SEQ ID NO: 787 - DNA, 30 bp, Hepatitis B virus
  source 1..30: mol_type = genomic DNA
cctctgccgatccatactgcggaactccta

SEQ ID NO: 788 - DNA, 20 bp, Hepatitis B virus
  source 1..20: mol_type = genomic DNA
cctctgccgatccatactgc

SEQ ID NO: 789 - DNA, 20 bp, Hepatitis B virus
  source 1..20: mol_type = genomic DNA
cctctctttacgcggactcc

SEQ ID NO: 790 - DNA, 20 bp, Hepatitis B virus
  source 1..20: mol_type = genomic DNA
cctcacaataccgcagagtc

SEQ ID NO: 791 - DNA, 20 bp, Hepatitis B virus
  source 1..20: mol_type = genomic DNA
ccgtgtgcacttcgcttcac

SEQ ID NO: 792 - DNA, 20 bp, Hepatitis B virus
  source 1..20: mol_type = genomic DNA
ccgtgtgcacttcgctgttg

SEQ ID NO: 793 - DNA, 16 bp, Hepatitis B virus
  source 1..16: mol_type = genomic DNA
ccgtgtgcacttcgct

SEQ ID NO: 794 - DNA, 20 bp, Hepatitis B virus
  source 1..20: mol_type = genomic DNA
ccgtctgtgccttctcatct

SEQ ID NO: 795 - DNA, 20 bp, Hepatitis B virus
  source 1..20: mol_type = genomic DNA
ccgtcggcgctgaatcctgc

SEQ ID NO: 796 - DNA, 20 bp, Hepatitis B virus
  source 1..20: mol_type = genomic DNA
ccggtccgtgtgcacttcgc

SEQ ID NO: 797 - DNA, 20 bp, Hepatitis B virus
  source 1..20: mol_type = genomic DNA
ccggaccgtgtgcacttcgc

SEQ ID NO: 798 - DNA, 20 bp, Hepatitis B virus
  source 1..20: mol_type = genomic DNA
ccgatccatactgcggaact

SEQ ID NO: 799 - DNA, 20 bp, Hepatitis B virus
  source 1..20: mol_type = genomic DNA
cccgtcggcgctgaatcctg

SEQ ID NO: 800 - DNA, 20 bp, Hepatitis B virus
  source 1..20: mol_type = genomic DNA
ccccgtctgtgccttctcat

SEQ ID NO: 801 - DNA, 20 bp, Hepatitis B virus
  source 1..20: mol_type = genomic DNA
caggtcccctagaagaagaa

SEQ ID NO: 802 - DNA, 20 bp, Hepatitis B virus
  source 1..20: mol_type = genomic DNA
cacggggcgcacctctcttt

SEQ ID NO: 803 - DNA, 20 bp, Hepatitis B virus
  source 1..20: mol_type = genomic DNA
cacctctctttacgcggact

SEQ ID NO: 804 - DNA, 20 bp, Hepatitis B virus
  source 1..20: mol_type = genomic DNA
caagaatcctcacaataccg

SEQ ID NO: 805 - DNA, 20 bp, Hepatitis B virus
  source 1..20: mol_type = genomic DNA
atctgccggaccgtgtgcac

SEQ ID NO: 806 - DNA, 20 bp, Hepatitis B virus
  source 1..20: mol_type = genomic DNA
atcctcacaataccgcagag

SEQ ID NO: 807 - DNA, 30 bp, Hepatitis B virus
  source 1..30: mol_type = genomic DNA
agactcgtggtggacttctctcaattttct

SEQ ID NO: 808 - DNA, 20 bp, Hepatitis B virus
  source 1..20: mol_type = genomic DNA
agaatcctcacaataccgca

SEQ ID NO: 809 - DNA, 20 bp, Hepatitis B virus
  source 1..20: mol_type = genomic DNA
acgtcccgtcggcgctgaat

SEQ ID NO: 810 - DNA, 20 bp, Hepatitis B virus
  source 1..20: mol_type = genomic DNA
acgcggactccccgtctgtg

SEQ ID NO: 811 - DNA, 20 bp, Hepatitis B virus
  source 1..20: mol_type = genomic DNA
acctctctttacgcggactc

SEQ ID NO: 812 - DNA, 20 bp, Hepatitis B virus
  source 1..20: mol_type = genomic DNA
accgtgtgcacttcgcttca

SEQ ID NO: 813 - DNA, 20 bp, Hepatitis B virus
  source 1..20: mol_type = genomic DNA
accaatttatgcctacagcg

SEQ ID NO: 814 - DNA, 20 bp, Hepatitis B virus
  source 1..20: mol_type = genomic DNA
acaagaatcctcacaatacc

SEQ ID NO: 815 - DNA, 20 bp, Hepatitis B virus
  source 1..20: mol_type = genomic DNA
aatcctcacaataccgcaga

SEQ ID NO: 816 - DNA, 20 bp, Hepatitis B virus
  source 1..20: mol_type = genomic DNA
aaggtatgttgcccgtttgt

SEQ ID NO: 817 - DNA, 20 bp, Hepatitis B virus
  source 1..20: mol_type = genomic DNA
aagaatcctcacaataccgc

SEQ ID NO: 818 - skipped

SEQ ID NO: 819 - DNA, 20 bp, Hepatitis B virus
  source 1..20: mol_type = genomic DNA
ctagactcgtggtggacttc

SEQ ID NO: 820 - DNA, 20 bp, Hepatitis B virus
  source 1..20: mol_type = genomic DNA
cctgctgctatgcctcatct

SEQ ID NO: 821 - DNA, 20 bp, Hepatitis B virus
  source 1..20: mol_type = genomic DNA
ctgctgctatgcctcatctt

SEQ ID NO: 822 - DNA, 20 bp, Hepatitis B virus
  source 1..20: mol_type = genomic DNA
tgctgctatgcctcatcttc

SEQ ID NO: 823 - DNA, 20 bp, Hepatitis B virus
  source 1..20: mol_type = genomic DNA
gctgctatgcctcatcttct

SEQ ID NO: 824 - DNA, 20 bp, Hepatitis B virus
  source 1..20: mol_type = genomic DNA
ctgctatgcctcatcttctt

SEQ ID NO: 825 - DNA, 20 bp, Hepatitis B virus
  source 1..20: mol_type = genomic DNA
cctatgggagtgggcctcag

SEQ ID NO: 826 - DNA, 20 bp, Hepatitis B virus
  source 1..20: mol_type = genomic DNA
gccatttgttcagtggttcg

SEQ ID NO: 827 - DNA, 20 bp, Hepatitis B virus
  source 1..20: mol_type = genomic DNA
ggaggctgtaggcataaatt

SEQ ID NO: 828 - DNA, 20 bp, Hepatitis B virus
  source 1..20: mol_type = genomic DNA
gaggctgtaggcataaattg

SEQ ID NO: 829 - DNA, 20 bp, Hepatitis B virus
  source 1..20: mol_type = genomic DNA
aggctgtaggcataaattgg

SEQ ID NO: 830 - DNA, 20 bp, Hepatitis B virus
  source 1..20: mol_type = genomic DNA
ggctgtaggcataaattggt

SEQ ID NO: 831 - DNA, 20 bp, Hepatitis B virus
  source 1..20: mol_type = genomic DNA
ttcaagcctccaagctgtgc

SEQ ID NO: 832 - DNA, 20 bp, Hepatitis B virus
  source 1..20: mol_type = genomic DNA
tcaagcctccaagctgtgcc

SEQ ID NO: 833 - DNA, 20 bp, Hepatitis B virus
  source 1..20: mol_type = genomic DNA
caagcctccaagctgtgcct

SEQ ID NO: 834 - DNA, 20 bp, Hepatitis B virus
  source 1..20: mol_type = genomic DNA
aagcctccaagctgtgcctt

SEQ ID NO: 835 - DNA, 20 bp, Hepatitis B virus
  source 1..20: mol_type = genomic DNA
agcctccaagctgtgccttg

SEQ ID NO: 836 - DNA, 20 bp, Hepatitis B virus
  source 1..20: mol_type = genomic DNA
gcctccaagctgtgccttgg

SEQ ID NO: 837 - DNA, 20 bp, Hepatitis B virus
  source 1..20: mol_type = genomic DNA
gaactccctcgcctcgcaga

SEQ ID NO: 838 - DNA, 19 bp, Hepatitis B virus
  source 1..19: mol_type = genomic DNA
caccatattcttgggaaca

SEQ ID NO: 839 - DNA, 22 bp, synthetic construct
  source 1..22: mol_type = other DNA
  modified_base 4: mod_base = OTHER; note = 2'-deoxy 5-methylcytidine
  modified_base 11: mod_base = OTHER; note = 2'-deoxy 5-methylcytidine
  modified_base 15: mod_base = OTHER; note = 2'-deoxy 5-methylcytidine
  modified_base 1..22: mod_base = OTHER; note = linked via phosphorothioate
tgactgtgaacgttcgagatga